(19) United States
(12) Patent Application Publication
(10) Pub. No.: US 2022/0257733 A1
(43) Pub. Date: Aug. 18, 2022

(54) ANTIGENIC POLYPEPTIDES AND METHODS OF USE THEREOF

(71) Applicant: AGENUS INC., Lexington, MA (US)

(72) Inventors: Dennis John UNDERWOOD, Lexington, MA (US); Paisley Trantham MYERS, Lexington, MA (US); Erin Denise JEFFERY, Lexington, MA (US); Matthew Joseph PEREZ, Lexington, MA (US); Benjamin Maxime MORIN, Lexington, MA (US); Mark Arthur FINDEIS, Lexington, MA (US); Bishnu JOSHI, Lexington, MA (US)

(21) Appl. No.: 17/582,548

(22) Filed: Jan. 24, 2022

Related U.S. Application Data
(63) Continuation of application No. PCT/US2020/043435, filed on Jul. 24, 2020.
(60) Provisional application No. 62/925,616, filed on Oct. 24, 2019.
(60) Provisional application No. 62/878,159, filed on Jul. 24, 2019.

(51) Int. Cl. A61K 39/00; C07K 14/725; C07K 16/28

(52) U.S. Cl. CPC A61K 39/0011; C07K 14/7051; C07K 2319/00; A61K 2039/6043; A61K 2039/605; C07K 16/2833

(57) ABSTRACT

Provided are novel antigenic polypeptides comprising tumor-associated peptides, and compositions comprising the same. Such antigenic polypeptides and compositions are particularly useful as immunotherapeutics (e.g., cancer vaccines). Also provided are methods of inducing a cellular immune response using the polypeptides and compositions, methods of treating a disease using the polypeptides and compositions, kits comprising the polypeptides and compositions, methods of making the compositions, and antibodies and T cell receptors that specifically bind to the polypeptides.

### 1. RELATED APPLICATIONS

[0001] This application is a Continuation of International Patent Application No. PCT/US2020/043435, filed on Jul. 24, 2020, which claims priority to U.S. Provisional Patent Application Ser. No. 62/878,159, entitled “Antigenic Polypeptides And Methods Of Use Thereof”, filed Jul. 24, 2019, and U.S. Provisional Patent Application Ser. No. 62/925,616, entitled “Antigenic Polypeptides And Methods Of Use Thereof”, filed Oct. 24, 2019. The contents of the aforementioned applications are hereby incorporated by reference herein in their entireties.

### 2. SEQUENCE LISTING

[0002] The sequence listing attached herewith, named 404293_AGBW_141US_188624_Sequence_Listing.txt and created on Jul. 24, 2020, is herein incorporated by reference in its entirety.

### 3. FIELD

[0003] The instant disclosure relates to novel antigenic polypeptides and compositions, and uses of such antigenic polypeptides and compositions as immunotherapeutics (e.g., cancer vaccines).

### 4. BACKGROUND

[0004] Immunotherapies are becoming important tools in the treatment of cancer. One immunotherapy approach involves the use of therapeutic cancer vaccines comprising cancer-specific antigenic peptides that actively educate a patient's immune system to target and destroy cancer cells. However, the generation of such therapeutic cancer vaccines is limited by the availability of immunogenic cancer-specific antigenic peptides.

[0005] Accordingly, there is a need in the art for improved immunogenic cancer-specific peptides and for creating effective anti-cancer vaccines comprising these peptides.

### 5. SUMMARY OF INVENTION

[0006] The instant disclosure provides novel antigenic polypeptides comprising tumor-associated peptides, and compositions comprising the same. Such antigenic polypeptides and compositions are particularly useful as immunotherapeutics (e.g., cancer vaccines). Also provided are methods of inducing a cellular immune response using the polypeptides and compositions, methods of treating a disease using the polypeptides and compositions, kits comprising the polypeptides and compositions, methods of making the compositions, and antibodies and T cell receptors that specifically bind to the polypeptides.

[0007] Accordingly, the instant disclosure provides the following, non-limiting, embodiments:

Embodiment 1. An antigenic polypeptide of 8, 9, 10, 11, 12, 13, 14, 15, 16, 17, 18, 19, 20, 21, 22, 23, 24, 25, 26, 27, 28, 29, 30, 31, 32, 33, 34, 35, 36, 37, 38, 39, 40, 41, 42, 43, 44, 45, 46, 47, 48, 49, 50, 51, 52, 53, 54, 55, 56, 57, 58, 59, 60, 61, 62, 63, 64, 65, 66, 67, 68, 69, 70, 71, 72, 73, 74, 75, 76, 77, 78, 79, 80, 81, 82, 83, 84, 85, 86, 87, 88, 89, 90, 91, 92, 93, 94, 95, 96, 97, 98, 99, or 100 amino acids in length, comprising an MHC-binding peptide comprising an amino acid sequence selected from the group consisting of SEQ ID NOs: 98-1371, 3921-3996, and 4149-4171.
Embodiment 2. The antigenic polypeptide of embodiment 1, wherein the amino acid sequence of the MHC-binding peptide consists of an amino acid sequence selected from the group consisting of SEQ ID NOs: 98-1371, 3921-3996, and 4149-4171.
Embodiment 3. The antigenic polypeptide of embodiment 1, wherein the amino acid sequence of the antigenic polypeptide consists of an amino acid sequence selected from the group consisting of SEQ ID NOs: 98-1371, 3921-3996, and 4149-4171.
Embodiment 4. The antigenic polypeptide of embodiment 1 or 2, further comprising an HSP-binding peptide.
Embodiment 5. The antigenic polypeptide of embodiment 4, wherein the HSP-binding peptide comprises the amino acid sequence of X₁X₂X₃X₄X₅X₆X₇ (SEQ ID NO: 1), wherein X₁ is omitted, N, F, or Q; X₂ is W, L, or F; X₃ is L or I; X₄ is R, L, or K; X₅ is L, W, or I; X₆ is T, L, F, K, R, or W; and X₇ is W, G, K, or F.
Embodiment 6. The antigenic polypeptide of embodiment 5, wherein the HSP-binding peptide comprises the amino acid sequence of:
(a) X₁LX₂LTX₃ (SEQ ID NO: 2), wherein X₁ is W or F; X₂ is R or K; and X₃ is W, F, or G;
(b) NX₁LX₂LTX₃ (SEQ ID NO: 3), wherein X₁ is W or F; X₂ is R or K; and X₃ is W, F, or G;
(c) WLX₁LTX₂ (SEQ ID NO: 4), wherein X₁ is R or K; and X₂ is W or G;
(d) NWLX₁LTX₂ (SEQ ID NO: 5), wherein X₁ is R or K; and X₂ is W or G; or
(e) NWX₁X₂X₃X₄X₅ (SEQ ID NO: 6), wherein X₁ is L or I; X₂ is L, R, or K; X₃ is L or I; X₄ is T, L, F, K, R, or W; and X₅ is W or K.
Embodiment 7. The antigenic polypeptide of embodiment 4, wherein the HSP-binding peptide comprises an amino acid sequence selected from the group consisting of SEQ ID NOs: 7-42, optionally wherein the amino acid sequence of the HSP-binding peptide consists of an amino acid sequence selected from the group consisting of SEQ ID NOs: 7-42.
Embodiment 8. The antigenic polypeptide of embodiment 4, wherein the HSP-binding peptide comprises the amino acid sequence of SEQ ID NO: 7, optionally wherein the amino acid sequence of the HSP-binding peptide consists of the amino acid sequence of SEQ ID NO: 7.
Embodiment 9. The antigenic polypeptide of embodiment 4, wherein the HSP-binding peptide comprises the amino acid sequence of SEQ ID NO: 8, optionally wherein the amino acid sequence of the HSP-binding peptide consists of the amino acid sequence of SEQ ID NO: 8.
Embodiment 10. The antigenic polypeptide of embodiment 4, wherein the HSP-binding peptide comprises the amino acid sequence of SEQ ID NO: 9, optionally wherein the amino acid sequence of the HSP-binding peptide consists of the amino acid sequence of SEQ ID NO: 9.
Embodiment 11. The antigenic polypeptide of embodiment 4, wherein the HSP-binding peptide comprises the amino acid sequence of SEQ ID NO: 10, optionally wherein the amino acid sequence of the HSP-binding peptide consists of the amino acid sequence of SEQ ID NO: 10.
Embodiment 12. The antigenic polypeptide of embodiment 4, wherein the HSP-binding peptide comprises the amino acid sequence of SEQ ID NO: 11, optionally wherein the amino acid sequence of the HSP-binding peptide consists of the amino acid sequence of SEQ ID NO: 11.
Embodiment 13. The antigenic polypeptide of embodiment 4, wherein the HSP-binding peptide comprises the amino acid sequence of SEQ ID NO: 12, optionally wherein the amino acid sequence of the HSP-binding peptide consists of the amino acid sequence of SEQ ID NO: 12.
Embodiment 14. The antigenic polypeptide of embodiment 4, wherein the HSP-binding peptide comprises the amino acid sequence of SEQ ID NO: 13, optionally wherein the amino acid sequence of the HSP-binding peptide consists of the amino acid sequence of SEQ ID NO: 13.
Embodiment 15. The antigenic polypeptide of embodiment 4, wherein the HSP-binding peptide comprises the amino acid sequence of SEQ ID NO: 14, optionally wherein the amino acid sequence of the HSP-binding peptide consists of the amino acid sequence of SEQ ID NO: 14.
Embodiment 16. The antigenic polypeptide of embodiment 4, wherein the HSP-binding peptide comprises the amino acid sequence of SEQ ID NO: 15, optionally wherein the amino acid sequence of the HSP-binding peptide consists of the amino acid sequence of SEQ ID NO: 15.
Embodiment 17. The antigenic polypeptide of embodiment 4, wherein the HSP-binding peptide comprises the amino acid sequence of SEQ ID NO: 16, optionally wherein the amino acid sequence of the HSP-binding peptide consists of the amino acid sequence of SEQ ID NO: 16.
Embodiment 18. The antigenic polypeptide of embodiment 4, wherein the HSP-binding peptide comprises the amino acid sequence of SEQ ID NO: 17, optionally wherein the amino acid sequence of the HSP-binding peptide consists of the amino acid sequence of SEQ ID NO: 17.
Embodiment 19. The antigenic polypeptide of embodiment 4, wherein the HSP-binding peptide comprises the amino acid sequence of SEQ ID NO: 18, optionally wherein the amino acid sequence of the HSP-binding peptide consists of the amino acid sequence of SEQ ID NO: 18.
Embodiment 20. The antigenic polypeptide of embodiment 4, wherein the HSP-binding peptide comprises the amino acid sequence of SEQ ID NO: 19, optionally wherein the amino acid sequence of the HSP-binding peptide consists of the amino acid sequence of SEQ ID NO: 19.
Embodiment 21. The antigenic polypeptide of embodiment 4, wherein the HSP-binding peptide comprises the amino acid sequence of SEQ ID NO: 20, optionally wherein the amino acid sequence of the HSP-binding peptide consists of the amino acid sequence of SEQ ID NO: 20.
Embodiment 22. The antigenic polypeptide of embodiment 4, wherein the HSP-binding peptide comprises the amino acid sequence of SEQ ID NO: 21, optionally wherein the amino acid sequence of the HSP-binding peptide consists of the amino acid sequence of SEQ ID NO: 21.
Embodiment 23. The antigenic polypeptide of embodiment 4, wherein the HSP-binding peptide comprises the amino acid sequence of SEQ ID NO: 22, optionally wherein the amino acid sequence of the HSP-binding peptide consists of the amino acid sequence of SEQ ID NO: 22.
Embodiment 24. The antigenic polypeptide of embodiment 4, wherein the HSP-binding peptide comprises the amino acid sequence of SEQ ID NO: 23, optionally wherein the amino acid sequence of the HSP-binding peptide consists of the amino acid sequence of SEQ ID NO: 23.
Embodiment 25. The antigenic polypeptide of embodiment 4, wherein the HSP-binding peptide comprises the amino acid sequence of SEQ ID NO: 24, optionally wherein the amino acid sequence of the HSP-binding peptide consists of the amino acid sequence of SEQ ID NO: 24.
Embodiment 26. The antigenic polypeptide of embodiment 4, wherein the HSP-binding peptide comprises the amino acid sequence of SEQ ID NO: 25, optionally wherein the amino acid sequence of the HSP-binding peptide consists of the amino acid sequence of SEQ ID NO: 25.
Embodiment 27. The antigenic polypeptide of embodiment 4, wherein the HSP-binding peptide comprises the amino acid sequence of SEQ ID NO: 26, optionally wherein the amino acid sequence of the HSP-binding peptide consists of the amino acid sequence of SEQ ID NO: 26.
Embodiment 28. The antigenic polypeptide of embodiment 4, wherein the HSP-binding peptide comprises the amino acid sequence of SEQ ID NO: 27, optionally wherein the amino acid sequence of the HSP-binding peptide consists of the amino acid sequence of SEQ ID NO: 27.
Embodiment 29. The antigenic polypeptide of embodiment 4, wherein the HSP-binding peptide comprises the amino acid sequence of SEQ ID NO: 28, optionally wherein the amino acid sequence of the HSP-binding peptide consists of the amino acid sequence of SEQ ID NO: 28.
Embodiment 30. The antigenic polypeptide of embodiment 4, wherein the HSP-binding peptide comprises the amino acid sequence of SEQ ID NO: 29, optionally wherein the amino acid sequence of the HSP-binding peptide consists of the amino acid sequence of SEQ ID NO: 29.
Embodiment 31. The antigenic polypeptide of embodiment 4, wherein the HSP-binding peptide comprises the amino acid sequence of SEQ ID NO: 30, optionally wherein the amino acid sequence of the HSP-binding peptide consists of the amino acid sequence of SEQ ID NO: 30.
Embodiment 32. The antigenic polypeptide of embodiment 4, wherein the HSP-binding peptide comprises the amino acid sequence of SEQ ID NO: 31, optionally wherein the amino acid sequence of the HSP-binding peptide consists of the amino acid sequence of SEQ ID NO: 31.
Embodiment 33. The antigenic polypeptide of embodiment 4, wherein the HSP-binding peptide comprises the amino acid sequence of SEQ ID NO: 32, optionally wherein the amino acid sequence of the HSP-binding peptide consists of the amino acid sequence of SEQ ID NO: 32.
Embodiment 34. The antigenic polypeptide of embodiment 4, wherein the HSP-binding peptide comprises the amino acid sequence of SEQ ID NO: 33, optionally wherein the amino acid sequence of the HSP-binding peptide consists of the amino acid sequence of SEQ ID NO: 33.
Embodiment 35. The antigenic polypeptide of embodiment 4, wherein the HSP-binding peptide comprises the amino acid sequence of SEQ ID NO: 34, optionally wherein the amino acid sequence of the HSP-binding peptide consists of the amino acid sequence of SEQ ID NO: 34.
Embodiment 36. The antigenic polypeptide of embodiment 4, wherein the HSP-binding peptide comprises the amino acid sequence of SEQ ID NO: 35, optionally wherein the amino acid sequence of the HSP-binding peptide consists of the amino acid sequence of SEQ ID NO: 35.
Embodiment 37. The antigenic polypeptide of embodiment 4, wherein the HSP-binding peptide comprises the amino acid sequence of SEQ ID NO: 36, optionally wherein the amino acid sequence of the HSP-binding peptide consists of the amino acid sequence of SEQ ID NO: 36.
Embodiment 38. The antigenic polypeptide of embodiment 4, wherein the HSP-binding peptide comprises the amino acid sequence of SEQ ID NO: 37, optionally wherein the amino acid sequence of the HSP-binding peptide consists of the amino acid sequence of SEQ ID NO: 37.
Embodiment 39. The antigenic polypeptide of embodiment 4, wherein the HSP-binding peptide comprises the amino acid sequence of SEQ ID NO: 38, optionally wherein the amino acid sequence of the HSP-binding peptide consists of the amino acid sequence of SEQ ID NO: 38.
Embodiment 40. The antigenic polypeptide of embodiment 4, wherein the HSP-binding peptide comprises the amino acid sequence of SEQ ID NO: 39, optionally wherein the amino acid sequence of the HSP-binding peptide consists of the amino acid sequence of SEQ ID NO: 39.
Embodiment 41. The antigenic polypeptide of embodiment 4, wherein the HSP-binding peptide comprises the amino acid sequence of SEQ ID NO: 40, optionally wherein the amino acid sequence of the HSP-binding peptide consists of the amino acid sequence of SEQ ID NO: 40.
Embodiment 42. The antigenic polypeptide of embodiment 4, wherein the HSP-binding peptide comprises the amino acid sequence of SEQ ID NO: 41, optionally wherein the amino acid sequence of the HSP-binding peptide consists of the amino acid sequence of SEQ ID NO: 41.
Embodiment 43. The antigenic polypeptide of embodiment 4, wherein the HSP-binding peptide comprises the amino acid sequence of SEQ ID NO: 42, optionally wherein the amino acid sequence of the HSP-binding peptide consists of the amino acid sequence of SEQ ID NO: 42.
Embodiment 44. The antigenic polypeptide of any one of the preceding embodiments, wherein the MHC-binding peptide is 8 to 50 amino acids in length, optionally 8, 9, 10, 11, 12, 13, 14, 15, 16, 17, 18, 19, 20, 21, 22, 23, 24, 25, 26, 27, 28, 29, 30, 31, 32, 33, 34, 35, 36, 37, 38, 39, 40, 41, 42, 43, 44, 45, 46, 47, 48, 49, or 50 amino acids in length.
Embodiment 45. The antigenic polypeptide of any one of embodiments 4-44, wherein the C-terminus of the MHC-binding peptide is linked to the N-terminus of the HSP-binding peptide.
Embodiment 46. The antigenic polypeptide of any one of embodiments 4-44, wherein the N-terminus of the MHC-binding peptide is linked to the C-terminus of the HSP-binding peptide.
Embodiment 47. The antigenic polypeptide of any one of embodiments 4-46, wherein the HSP-binding peptide is linked to the MHC-binding peptide via a chemical linker.
Embodiment 48. The antigenic polypeptide of any one of embodiments 4-46, wherein the HSP-binding peptide is linked to the MHC-binding peptide via a peptide linker.
Embodiment 49. The antigenic polypeptide of embodiment 48, wherein the peptide linker comprises the amino acid sequence of SEQ ID NO: 43, optionally wherein the amino acid sequence of the peptide linker consists of the amino acid sequence of SEQ ID NO: 43.
Embodiment 50. The antigenic polypeptide of embodiment 48, wherein the peptide linker comprises the amino acid sequence of FR, optionally wherein the amino acid sequence of the peptide linker consists of the amino acid sequence of FR.
Embodiment 51. The antigenic polypeptide of embodiment 49 or 50, wherein the N-terminus of the MHC-binding peptide is linked to the C-terminus of:
[0008] (a) the amino acid sequence of X₁X₂X₃X₄X₅X₆X₇FFRK (SEQ ID NO: 68), wherein X₁ is omitted, N, F, or Q; X₂ is W, L, or F; X₃ is L or I; X₄ is R, L, or K; X₅ is L, W, or I; X₆ is T, L, F, K, R, or W; and X₇ is W, G, K, or F;
[0009] (b) the amino acid sequence of X₁LX₂LTX₃FFRK (SEQ ID NO: 69), wherein X₁ is W or F; X₂ is R or K; and X₃ is W, F, or G;
[0010] (c) the amino acid sequence of NX₁LX₂LTX₃FFRK (SEQ ID NO: 70), wherein X₁ is W or F; X₂ is R or K; and X₃ is W, F, or G;
[0011] (d) the amino acid sequence of WLX₁LTX₂FFRK (SEQ ID NO: 71), wherein X₁ is R or K; and X₂ is W or G;
[0012] (e) the amino acid sequence of NWLX₁LTX₂FFRK (SEQ ID NO: 72), wherein X₁ is R or K; and X₂ is W or G;
[0013] (f) the amino acid sequence of NWX₁X₂X₃X₄X₅FFRK (SEQ ID NO: 73), wherein X₁ is L or I; X₂ is L, R, or K; X₃ is L or I; X₄ is T, L, F, K, R, or W; and X₅ is W or K; or
[0014] (g) an amino acid sequence selected from the group consisting of SEQ ID NOs: 74-97.
   Embodiment 52. The antigenic polypeptide of embodiment 49 or 50, wherein the N-terminus of the MHC-binding peptide is linked to the C-terminus of the amino acid sequence set forth in SEQ ID NO: 74.
   Embodiment 53. The antigenic polypeptide of embodiment 49 or 50, wherein the N-terminus of the MHC-binding peptide is linked to the C-terminus of the amino acid sequence set forth in SEQ ID NO: 75.
   Embodiment 54. The antigenic polypeptide of embodiment 49 or 50, wherein the N-terminus of the MHC-binding peptide is linked to the C-terminus of the amino acid sequence set forth in SEQ ID NO: 76.
   Embodiment 55. The antigenic polypeptide of embodiment 49 or 50, wherein the N-terminus of the MHC-binding peptide is linked to the C-terminus of the amino acid sequence set forth in SEQ ID NO: 77.
   Embodiment 56. The antigenic polypeptide of embodiment 49 or 50, wherein the N-terminus of the MHC-binding peptide is linked to the C-terminus of the amino acid sequence set forth in SEQ ID NO: 78.
   Embodiment 57. The antigenic polypeptide of embodiment 49 or 50, wherein the N-terminus of the MHC-binding peptide is linked to the C-terminus of the amino acid sequence set forth in SEQ ID NO: 79.
   Embodiment 58. The antigenic polypeptide of embodiment 49 or 50, wherein the N-terminus of the MHC-binding peptide is linked to the C-terminus of the amino acid sequence set forth in SEQ ID NO: 80.
   Embodiment 59. The antigenic polypeptide of embodiment 49 or 50, wherein the N-terminus of the MHC-binding peptide is linked to the C-terminus of the amino acid sequence set forth in SEQ ID NO: 81.
   Embodiment 60. The antigenic polypeptide of embodiment 49 or 50, wherein the N-terminus of the MHC-binding peptide is linked to the C-terminus of the amino acid sequence set forth in SEQ ID NO: 82.
   Embodiment 61. The antigenic polypeptide of embodiment 49 or 50, wherein the N-terminus of the MHC-binding peptide is linked to the C-terminus of the amino acid sequence set forth in SEQ ID NO: 83.
   Embodiment 62. The antigenic polypeptide of embodiment 49 or 50, wherein the N-terminus of the MHC-binding peptide is linked to the C-terminus of the amino acid sequence set forth in SEQ ID NO: 84.
   Embodiment 63. The antigenic polypeptide of embodiment 49 or 50, wherein the N-terminus of the MHC-binding peptide is linked to the C-terminus of the amino acid sequence set forth in SEQ ID NO: 85.
   Embodiment 64. The antigenic polypeptide of embodiment 49 or 50, wherein the N-terminus of the MHC-binding peptide is linked to the C-terminus of the amino acid sequence set forth in SEQ ID NO: 86.
   Embodiment 65. The antigenic polypeptide of embodiment 49 or 50, wherein the N-terminus of the MHC-binding peptide is linked to the C-terminus of the amino acid sequence set forth in SEQ ID NO: 87.
   Embodiment 66. The antigenic polypeptide of embodiment 49 or 50, wherein the N-terminus of the MHC-binding peptide is linked to the C-terminus of the amino acid sequence set forth in SEQ ID NO: 88.
   Embodiment 67. The antigenic polypeptide of embodiment 49 or 50, wherein the N-terminus of the MHC-binding peptide is linked to the C-terminus of the amino acid sequence set forth in SEQ ID NO: 89.
   Embodiment 68. The antigenic polypeptide of embodiment 49 or 50, wherein the N-terminus of the MHC-binding peptide is linked to the C-terminus of the amino acid sequence set forth in SEQ ID NO: 90.
   Embodiment 69. The antigenic polypeptide of embodiment 49 or 50, wherein the N-terminus of the MHC-binding peptide is linked to the C-terminus of the amino acid sequence set forth in SEQ ID NO: 91.
   Embodiment 70. The antigenic polypeptide of embodiment 49 or 50, wherein the N-terminus of the MHC-binding peptide is linked to the C-terminus of the amino acid sequence set forth in SEQ ID NO: 92.
   Embodiment 71. The antigenic polypeptide of embodiment 49 or 50, wherein the N-terminus of the MHC-binding peptide is linked to the C-terminus of the amino acid sequence set forth in SEQ ID NO: 93.
   Embodiment 72. The antigenic polypeptide of embodiment 49 or 50, wherein the N-terminus of the MHC-binding peptide is linked to the C-terminus of the amino acid sequence set forth in SEQ ID NO: 94.
   Embodiment 73. The antigenic polypeptide of embodiment 49 or 50, wherein the N-terminus of the MHC-binding peptide is linked to the C-terminus of the amino acid sequence set forth in SEQ ID NO: 95.
   Embodiment 74. The antigenic polypeptide of embodiment 49 or 50, wherein the N-terminus of the MHC-binding peptide is linked to the C-terminus of the amino acid sequence set forth in SEQ ID NO: 96.
   Embodiment 75. The antigenic polypeptide of embodiment 49 or 50, wherein the N-terminus of the MHC-binding peptide is linked to the C-terminus of the amino acid sequence set forth in SEQ ID NO: 97.
   Embodiment 76. The isolated polypeptide of embodiment 49 or 50, wherein the C-terminus of the MHC-binding peptide is linked to the N-terminus of:
[0015] (a) the amino acid sequence of FFRKX₁X₂X₃X₄X₅X₆X₇ (SEQ ID NO: 44), wherein X₁ is omitted, N, F, or Q; X₂ is W, L, or F; X₃ is L or I; X₄ is R, L, or K; X₅ is L, W, or I; X₆ is T, L, F, K, R, or W; and X₇ is W, G, K, or F;
[0016] (b) the amino acid sequence of FFRKX₁LX₂LTX₃ (SEQ ID NO: 45), wherein X₁ is W or F; X₂ is R or K; and X₃ is W, F, or G;
[0017] (c) the amino acid sequence of FFRKNX₁LX₂LTX₃ (SEQ ID NO: 46), wherein X₁ is W or F; X₂ is R or K; and X₃ is W, F, or G;
[0018] (d) the amino acid sequence of FFRKWLX₁LTX₂ (SEQ ID NO: 47), wherein X₁ is R or K; and X₂ is W or G;
[0019] (e) the amino acid sequence of FFRKNWLX₁LTX₂ (SEQ ID NO: 48), wherein X₁ is R or K; and X₂ is W or G;
[0020] (f) the amino acid sequence of FFRKNWX₁X₂X₃X₄X₅ (SEQ ID NO: 49), wherein X₁ is L or I; X₂ is L, R, or K; X₃ is L or I; X₄ is T, L, F, K, R, or W; and X₅ is W or K; or
[0021] (g) an amino acid sequence selected from the group consisting of SEQ ID NOs: 50-67.
   Embodiment 77. The antigenic polypeptide of embodiment 49 or 50, wherein the C-terminus of the MHC-binding peptide is linked to the N-terminus of the amino acid sequence set forth in SEQ ID NO: 50.
   Embodiment 78. The antigenic polypeptide of embodiment 49 or 50, wherein the C-terminus of the MHC-binding peptide is linked to the N-terminus of the amino acid sequence set forth in SEQ ID NO: 51.
   Embodiment 79. The antigenic polypeptide of embodiment 49 or 50, wherein the C-terminus of the MHC-binding peptide is linked to the N-terminus of the amino acid sequence set forth in SEQ ID NO: 52.
   Embodiment 80. The antigenic polypeptide of embodiment 49 or 50, wherein the C-terminus of the MHC-binding peptide is linked to the N-terminus of the amino acid sequence set forth in SEQ ID NO: 53.
   Embodiment 81. The antigenic polypeptide of embodiment 49 or 50, wherein the C-terminus of the MHC-binding peptide is linked to the N-terminus of the amino acid sequence set forth in SEQ ID NO: 54.
   Embodiment 82. The antigenic polypeptide of embodiment 49 or 50, wherein the C-terminus of the MHC-binding peptide is linked to the N-terminus of the amino acid sequence set forth in SEQ ID NO: 55.
   Embodiment 83. The antigenic polypeptide of embodiment 49 or 50, wherein the C-terminus of the MHC-binding peptide is linked to the N-terminus of the amino acid sequence set forth in SEQ ID NO: 56.
   Embodiment 84. The antigenic polypeptide of embodiment 49 or 50, wherein the C-terminus of the MHC-binding peptide is linked to the N-terminus of the amino acid sequence set forth in SEQ ID NO: 57.
   Embodiment 85. The antigenic polypeptide of embodiment 49 or 50, wherein the C-terminus of the MHC-binding peptide is linked to the N-terminus of the amino acid sequence set forth in SEQ ID NO: 58.
   Embodiment 86. The antigenic polypeptide of embodiment 49 or 50, wherein the C-terminus of the MHC-binding peptide is linked to the N-terminus of the amino acid sequence set forth in SEQ ID NO: 59.
   Embodiment 87. The antigenic polypeptide of embodiment 49 or 50, wherein the C-terminus of the MHC-binding peptide is linked to the N-terminus of the amino acid sequence set forth in SEQ ID NO: 60.
   Embodiment 88. The antigenic polypeptide of embodiment 49 or 50, wherein the C-terminus of the MHC-binding peptide is linked to the N-terminus of the amino acid sequence set forth in SEQ ID NO: 61.
   Embodiment 89. The antigenic polypeptide of embodiment 49 or 50, wherein the C-terminus of the MHC-binding peptide is linked to the N-terminus of the amino acid sequence set forth in SEQ ID NO: 62.
   Embodiment 90. The antigenic polypeptide of embodiment 49 or 50, wherein the C-terminus of the MHC-binding peptide is linked to the N-terminus of the amino acid sequence set forth in SEQ ID NO: 63.
   Embodiment 91. The antigenic polypeptide of embodiment 49 or 50, wherein the C-terminus of the MHC-binding peptide is linked to the N-terminus of the amino acid sequence set forth in SEQ ID NO: 64.
   Embodiment 92. The antigenic polypeptide of embodiment 49 or 50, wherein the C-terminus of the MHC-binding peptide is linked to the N-terminus of the amino acid sequence set forth in SEQ ID NO: 65.
   Embodiment 93. The antigenic polypeptide of embodiment 49 or 50, wherein the C-terminus of the MHC-binding peptide is linked to the N-terminus of the amino acid sequence set forth in SEQ ID NO: 66.
   Embodiment 94. The antigenic polypeptide of embodiment 49 or 50, wherein the C-terminus of the MHC-binding peptide is linked to the N-terminus of the amino acid sequence set forth in SEQ ID NO: 67.
   Embodiment 95. The antigenic polypeptide of embodiment 4, wherein the amino acid sequence of the antigenic polypeptide comprises an amino acid sequence selected from the group consisting of SEQ ID NOs: 1372-3919, 3997-4148, and 4172-4217.
   Embodiment 96. The antigenic polypeptide of any one of the preceding embodiments, wherein the antigenic polypeptide is 8 to 50 amino acids in length, optionally 8, 9, 10, 11, 12, 13, 14, 15, 16, 17, 18, 19, 20, 21, 22, 23, 24, 25, 26, 27, 28, 29, 30, 31, 32, 33, 34, 35, 36, 37, 38, 39, 40, 41, 42, 43, 44, 45, 46, 47, 48, 49, or 50 amino acids in length.
   Embodiment 97. The antigenic polypeptide of embodiment 4, wherein the amino acid sequence of the antigenic polypeptide consists of an amino acid sequence selected from the group consisting of SEQ ID NOs: 1372-3919, 3997-4148, and 4172-4217.
   Embodiment 98. The antigenic polypeptide of any one of the preceding embodiments, wherein the antigenic polypeptide is chemically synthesized.
   Embodiment 99. The antigenic polypeptide of any one of the preceding embodiments, wherein a phosphorylated amino acid residue of the phosphopeptide is replaced by a non-hydrolyzable mimetic of the phosphorylated amino acid residue.
   Embodiment 100. A composition comprising at least one of the antigenic polypeptides of any one of embodiments 1-99.
   Embodiment 101. A composition comprising a complex of the antigenic polypeptide of any one of embodiments 1-99 and a purified stress protein.
   Embodiment 102. The composition of embodiment 101, wherein the stress protein is selected from the group consisting of Hsc70, Hsp70, Hsp90, Hsp110, Grp170, Gp96, Calreticulin, and a mutant or fusion protein thereof.
   Embodiment 103. The composition of embodiment 102, wherein the stress protein is an Hsc70, optionally a human Hsc70.
   Embodiment 104. The composition of embodiment 103, wherein the Hsc70 comprises the amino acid sequence of SEQ ID NO: 3920.
   Embodiment 105. The composition of embodiment 103, wherein the amino acid sequence of the Hsc70 consists of the amino acid sequence of SEQ ID NO: 3920.
   Embodiment 106. The composition of any one of embodiments 101-105, wherein the stress protein is a recombinant protein.
   Embodiment 107. The composition any one of embodiments 100-106, comprising 2, 3, 4, 5, 6, 7, 8, 9, 10, 11, 12, 13, 14, 15, 16, 17, 18, 19, 20, 21, 22, 23, 24, 25, 26, 27, 28, 29, 30, 31, 32, 33, 34, 35, 36, 37, 38, 39, 40, 41, 42, 43, 44, 45, 46, 47, 48, 49, or 50 different antigenic polypeptides.
   Embodiment 108. The composition of embodiment 107, wherein each of the different polypeptides comprise the same HSP-binding peptide and a different MHC-binding peptide.
   Embodiment 109. The composition of any one of embodiments 100-108, wherein the total amount of the polypeptide(s) in the composition is about 0.1 to 20 nmol, optionally about 3, 4, 5, or 6 nmol.
   Embodiment 110. The composition of any one of embodiments 101-109, wherein the amount of the stress protein in the composition is about 10 μg to 600 μg, optionally about 120 μg, 240 μg, or 480 μg.
   Embodiment 111. The composition of any one of embodiments 101-110, wherein the molar ratio of the antigenic polypeptide(s) to the stress protein is about 0.5:1 to about 5:1, optionally about 1:1, 1.25:1, 1.5:1, 2:1, 2.5:1, 3:1, 3.5:1, 4:1, 4.5:1, or 5:1.
   Embodiment 112. The composition of any one of embodiments 100-111, wherein the composition further comprises an adjuvant.
   Embodiment 113. The composition of embodiment 112, wherein the adjuvant comprises a saponin or an immunostimulatory nucleic acid.
   Embodiment 114. The composition of embodiment 113, wherein the adjuvant comprises QS-21.
   Embodiment 115. The composition of embodiment 114, wherein the amount of the QS-21 in the composition is about 10 μg to about 200 μg, optionally about 25 μg, 50 μg, 75 μg, 100 μg, 125 μg, 150 μg, 175 μg, or 200 μg.
   Embodiment 116. The composition of any one of embodiments 112-115, wherein the adjuvant comprises a TLR agonist, optionally a TLR4 agonist, TLR5 agonist, TLR7 agonist, TLR8 agonist, and/or TLR9 agonist.
   Embodiment 117. The composition of any one of embodiments 100-116, further comprising a pharmaceutically acceptable carrier or excipient.
   Embodiment 118. The composition of embodiment 117, wherein the composition is in a unit dosage form.
   Embodiment 119. A method of inducing a cellular immune response to an antigenic polypeptide in a subject, the method comprising administering to the subject an effective amount of the antigenic polypeptide of any one of embodiments 1-99 or the composition of any one of embodiments 100-118.
   Embodiment 120. The method of embodiment 119, wherein the subject has cancer, optionally Acute Myeloid Leukemia (AML) or colorectal cancer.
   Embodiment 121. A method of treating a disease in a subject, the method comprising administering to the subject an effective amount of the antigenic polypeptide of any one of embodiments 1-99 or the composition of any one of embodiments 100-118.
   Embodiment 122. The method of embodiment 121, wherein the disease is cancer, optionally AML or colorectal cancer.
   Embodiment 123. The method of any one of embodiments 119-122, wherein the composition is administered to the subject weekly for four weeks.
   Embodiment 124. The method of embodiment 123, wherein at least two further doses of the composition are administered biweekly to the subject after the four weekly doses.
   Embodiment 125. The method of embodiment 123 or 124, wherein at least one booster dose of the composition is administered three months after the final weekly or biweekly dose.
   Embodiment 126. The method of embodiment 125, wherein the composition is further administered every three months for at least 1 year.
   Embodiment 127. The method of any one of embodiments 119-126, further comprising administering to the subject lenalidomide, dexamethasone, interleukin-2, recombinant interferon alfa-2b, or PEG-interferon alfa-2b.
   Embodiment 128. The method of any one of embodiments 119-127, further comprising administering to the subject an indoleamine dioxygenase-1 (IDO-1) inhibitor.
   Embodiment 129. The method of embodiment 128, wherein the IDO-1 inhibitor is 4-amino-N-(3-chloro-4-fluorophenyl)-N′-hydroxy-1,2,5-oxadiazole-3-carboximidamide.
   Embodiment 130. The method of any one of embodiments 119-129, further comprising administering to the subject an immune checkpoint antibody.
   Embodiment 131. The method of embodiment 130, wherein the immune checkpoint antibody is selected from the group consisting of an agonistic anti-GITR antibody, an agonistic anti-OX40 antibody, an antagonistic anti-PD-1 antibody, an antagonistic anti-CTLA-4 antibody, an antagonistic anti-TIM-3 antibody, an antagonistic anti-LAG-3 antibody, an antagonistic anti-TIGIT antibody, an agonistic anti-CD96 antibody, an antagonistic anti-VISTA antibody, an antagonistic anti-CD73 antibody, an agonistic anti-CD137 antibody, an antagonist anti-CEACAM1 antibody, an agonist anti-ICOS antibody, and an antigen-binding fragment thereof.
   Embodiment 132. A kit comprising a first container containing the polypeptide of any one of embodiments 1-99, or the composition of any one of embodiments 100-118 and a second container containing a purified stress protein capable of binding to the polypeptide.
   Embodiment 133. The kit of embodiment 132, wherein the total amount of the polypeptide(s) in the first container is about 0.1 to 20 nmol, optionally about 3, 4, 5, or 6 nmol.
   Embodiment 134. The kit of embodiment 132 or 133, wherein the stress protein is selected from the group consisting of Hsc70, Hsp70, Hsp90, Hsp110, Grp170, Gp96, Calreticulin, and a mutant or fusion protein thereof.
   Embodiment 135. The kit of embodiment 134, wherein the stress protein is an Hsc70, optionally human a Hsc70.
   Embodiment 136. The kit of embodiment 135, wherein the Hsc70 comprises the amino acid sequence of SEQ ID NO: 3920.
   Embodiment 137. The kit of embodiment 135, wherein the amino acid sequence of the Hsc70 consists of the amino acid sequence of SEQ ID NO: 3920.
   Embodiment 138. The kit of any one of embodiments 132-137, wherein the stress protein is a recombinant protein.
   Embodiment 139. The kit of any one of embodiments 132-138, wherein the amount of the stress protein in the second container is about 10 μg to 600 μg, optionally about 120 μg, 240 μg, or 480 μg.
   Embodiment 140. The kit of any one of embodiments 132-139, wherein the molar ratio of the polypeptide to the stress protein is about 0.5:1 to 5:1, optionally about 1:1, 1.25:1, 1.5:1, 2:1, 2.5:1, 3:1, 3.5:1, 4:1, 4.5:1, or 5:1.
   Embodiment 141. The kit of any one of embodiments 132-140, further comprising a third container containing an adjuvant.
   Embodiment 142. The kit of embodiment 141, wherein the adjuvant comprises a saponin or an immunostimulatory nucleic acid.
   Embodiment 143. The kit of embodiment 142, wherein the adjuvant comprises QS-21.
   Embodiment 144. The kit of embodiment 143, wherein the amount of the QS-21 in the third container is about 10 μg to about 200 μg, optionally about 25 μg, 50 μg, 75 μg, 100 μg, 125 μg, 150 μg, 175 μg, or 200 μg.
   Embodiment 145. The kit of any one of embodiments 141-144, wherein the adjuvant comprises a TLR agonist, optionally a TLR4 agonist, TLR5 agonist, TLR7 agonist, TLR8 agonist, and/or TLR9 agonist.
   Embodiment 146. A method of making a vaccine, the method comprising mixing one or more of the polypeptides of any one of embodiments 1-99, or the composition of any one of embodiments 100-118, with a purified stress protein under suitable conditions such that the purified stress protein binds to at least one of the polypeptides.
   Embodiment 147. The method of embodiment 146, wherein the stress protein is selected from the group consisting of Hsc70, Hsp70, Hsp90, Hsp110, Grp170, Gp96, Calreticulin, and a mutant or fusion protein thereof.
   Embodiment 148. The method of embodiment 147, wherein the stress protein is an Hsc70, optionally a human Hsc70.
   Embodiment 149. The method of embodiment 148, wherein the Hsc70 comprises the amino acid sequence of SEQ ID NO: 3920.
   Embodiment 150. The method of embodiment 148, wherein the amino acid sequence of the Hsc70 consists of the amino acid sequence of SEQ ID NO: 3920.
   Embodiment 151. The method of any one of embodiments 146-150, wherein the stress protein is a recombinant protein.
   Embodiment 152. The method of any one of embodiments 146-151, wherein the molar ratio of the polypeptide to the stress protein is about 0.5:1 to 5:1, optionally about 1:1, 1.25:1, 1.5:1, 2:1, 2.5:1, 3:1, 3.5:1, 4:1, 4.5:1, or 5:1.
   Embodiment 153. The method of any one of embodiments 146-152, wherein the suitable conditions comprise a temperature of about 37° C.
   Embodiment 154. An isolated antibody that: (i) specifically binds to an MHC-binding peptide selected from the group consisting of SEQ ID NOs: 98-1371, 3921-3996, and 4149-4171, optionally wherein the antibody does not specifically bind to an unphosphorylated variant of the MHC-binding peptide; and/or (ii) specifically binds to a complex of an MHC molecule and an MHC-binding peptide selected from the group consisting of SEQ ID NOs: 98-1371, 3921-3996, and 4149-4171, optionally wherein the antibody does not specifically bind to a complex of an MHC molecule and an unphosphorylated variant of the MHC-binding peptide.
   Embodiment 155. The antibody of embodiment 154, which is a chimeric antigen receptor.
   Embodiment 156. An isolated T cell receptor (TCR) that specifically binds to a complex of an MHC molecule and an MHC-binding peptide selected from the group consisting of SEQ ID NOs: 98-1371, 3921-3996, and 4149-4171, optionally wherein the TCR does not specifically bind to a complex of the MHC molecule and an unphosphorylated variant of the MHC-binding peptide.
   Embodiment 157. The TCR of embodiment 156, which is a soluble TCR.
   Embodiment 158. The TCR of embodiment 156 or 157, further comprising a CD3 binding moiety.
   Embodiment 159. An isolated polynucleotide encoding a VH and/or VL of the antibody of embodiment 154 or 155.
   Embodiment 160. An isolated polynucleotide encoding a variable region, optionally a Va and/or VO, of the TCR of any one of embodiments 156-158.
   Embodiment 161. The isolated polynucleotide of embodiment 159 or 160, which is an mRNA.
   Embodiment 162. A vector comprising the polynucleotide of embodiment 159 or 160.
   Embodiment 163. An engineered cell comprising the antibody of embodiment 154 or 155, or the TCR of any one of embodiments 156-158.
   Embodiment 164. An engineered cell comprising the polynucleotide of any one of embodiments 159-161 or the vector of embodiment 162.
   Embodiment 165. The engineered cell of embodiment 163 or 164, wherein the cell is a human lymphocyte.
   Embodiment 166. The engineered cell of any one of embodiments 163-165, wherein the cell is selected from the group consisting of a T cell, a CD8+ T cell, a CD4+ T cell, a natural killer T (NKT) cell, an invariant natural killer T (iNKT) cell, a mucosal-associated invariant T (MAiT) cell, and a natural killer (NK) cell.

### 6. DETAILED DESCRIPTION

[0022] The instant disclosure provides novel antigenic polypeptides comprising tumor-associated peptides, and compositions comprising the same. Such antigenic polypeptides and compositions are particularly useful as immunotherapeutics (e.g., cancer vaccines). Also provided are methods of inducing a cellular immune response using the polypeptides and compositions, methods of treating a disease using the polypeptides and compositions, kits comprising the polypeptides and compositions, methods of making the compositions, and antibodies and T cell receptors that specifically bind to the polypeptides.

### 6.1 Definitions

[0023] Unless otherwise defined herein, scientific and technical terms used herein have the meanings that are commonly understood by those of ordinary skill in the art. In the event of any latent ambiguity, definitions provided herein take precedent over any dictionary or extrinsic definition. Unless otherwise required by context, singular terms shall include pluralities and plural terms shall include the singular. The use of “or” means “and/or” unless stated otherwise. The use of the term “including”, as well as other forms, such as “includes” and “included”, is not limiting.

[0024] As used herein, the terms “about” and “approximately,” when used to modify a numeric value or numeric range, indicate that deviations of 5% to 10% above (e.g., up to 5% to 10% above) and 5% to 10% below (e.g., up to 5% to 10% below) the recited value or range remain within the intended meaning of the recited value or range.

[0025] As used herein, the term “antigenic polypeptide” refers to a polymer comprising one or more MHC-binding peptides. An antigenic polypeptide can comprise one or more non-amino-acid-residue structures. In certain embodiments, an antigenic polypeptide comprises a chemical linker, e.g., a chemical linker linking two peptide portions of the antigenic polypeptide.

[0026] As used herein, the terms “major histocompatibility complex” and “MHC” are used interchangeably and refer to an MHC class I molecule and/or an MHC class II molecule.

[0027] As used herein, the terms “human leukocyte antigen” and “HLA” are used interchangeably and refer to major histocompatibility complex (MHC) in humans. An HLA molecule may be a class I MHC molecule (e.g., HLA-A, HLA-B, HLA-C) or a class II MHC molecule (e.g., HLA-DP, HLA-DQ, HLA-DR).

[0028] As used herein, the term “MHC-binding peptide” refers to a peptide that binds to or is predicted to bind to an MHC molecule, e.g., such that the peptide is capable of being presented by the MHC molecule to a T-cell.

[0029] As used herein, the term “HSP-binding peptide” refers to a peptide that non-covalently binds to a heat shock protein (HSP).

[0030] As used herein, the term “peptide linker” refers to a peptide bond or a peptide sequence that links a C-terminal amino acid residue of a first peptide to an N-terminal amino acid residue of a second peptide.

[0031] As used herein, the term “chemical linker” refers to any chemical bond or moiety that is capable of linking two molecules (e.g., two peptides), wherein the bond or moiety is not a peptide linker.

[0032] As used herein, the term “isolated” with respect to a polypeptide, polynucleotide, antibody, or T cell receptor, refers to polypeptide, polynucleotide, antibody, or T cell receptor, that is separated from at least one impurity, e.g., an impurity found together with the molecule in nature, or present after the expression (e.g., recombinant expression) or synthesis (e.g., chemical synthesis) of the molecule.

[0033] As used herein, the terms “antibody” and “antibodies” include full-length antibodies, antigen-binding fragments of full-length antibodies, and molecules comprising antibody CDRs, VH regions, and/or VL regions. Examples of antibodies include, without limitation, monoclonal antibodies, recombinantly produced antibodies, monospecific antibodies, multispecific antibodies (including bispecific antibodies), human antibodies, humanized antibodies, chimeric antibodies, immunoglobulins, synthetic antibodies, tetrameric antibodies comprising two heavy chain and two light chain molecules, an antibody light chain monomer, an antibody heavy chain monomer, an antibody light chain dimer, an antibody heavy chain dimer, an antibody light chain-antibody heavy chain pair, intrabodies, heteroconjugate antibodies, antibody-drug conjugates, single domain antibodies, monovalent antibodies, single chain antibodies or single-chain Fvs (scFv), camelized antibodies, affybodies, Fab fragments, F(ab′)₂ fragments, disulfide-linked Fvs (sdFv), anti-idiotypic (anti-Id) antibodies (including, e.g., anti-anti-Id antibodies), and antigen-binding fragments of any of the above, and conjugates or fusion proteins comprising any of the above (e.g., a chimeric antigen receptor). In certain embodiments, antibodies described herein refer to polyclonal antibody populations. Antibodies can be of any type (e.g., IgG, IgE, IgM, IgD, IgA or IgY), any class (e.g., IgG₁, IgG₂, IgG₃, IgG₄, IgA₁ or IgA₂), or any subclass (e.g., IgG₂ₐ or IgG_{2b}) of immunoglobulin molecule. In certain embodiments, antibodies described herein are IgG antibodies, or a class (e.g., human IgG₁ or IgG₄) or subclass thereof. In a specific embodiment, the antibody is a humanized monoclonal antibody. In another specific embodiment, the antibody is a human monoclonal antibody. In certain embodiments, the antibody is chimeric antigen receptor.

[0034] As used herein, the terms “variable region” and “variable domain” are used interchangeably and are common in the art. The variable region typically refers to a portion of an antibody, generally, a portion of a light or heavy chain, typically about the amino-terminal 110 to 120 amino acids or 110 to 125 amino acids in the mature heavy chain and about 90 to 115 amino acids in the mature light chain, which differ extensively in sequence among antibodies and are used in the binding and specificity of a particular antibody for its particular antigen. The variability in sequence is concentrated in those regions called complementarity determining regions (CDRs) while the more highly conserved regions in the variable domain are called framework regions (FR). Without wishing to be bound by any particular mechanism or theory, it is believed that the CDRs of the light and heavy chains are primarily responsible for the interaction and specificity of the antibody with antigen. In certain embodiments, the variable region is a human variable region. In certain embodiments, the variable region comprises rodent or murine CDRs and human framework regions (FRs). In particular embodiments, the variable region is a primate (e.g., non-human primate) variable region. In certain embodiments, the variable region comprises rodent or murine CDRs and primate (e.g., non-human primate) framework regions (FRs).

[0035] As used herein, the terms “VH region” and “VL region” refer, respectively, to single antibody heavy and light chain variable regions, comprising FR (Framework Regions) 1, 2, 3 and 4 and CDR (Complementarity Determining Regions) 1, 2 and 3 (see Kabat et al., (1991) Sequences of Proteins of Immunological Interest (NIH Publication No. 91-3242, Bethesda), which is herein incorporated by reference in its entirety).

[0036] As used herein, the term “chimeric antigen receptor” refers to a fusion protein comprising one or more antibody variable regions linked to heterologous transmembrane and cytoplasmic regions (e.g., cytoplasmic regions from a T cell costimulatory receptor, such as CD28 or 41BB).

[0037] As used herein, the terms “T cell receptor” and “TCR” are used interchangeably and refer to molecules comprising CDRs or variable regions from αβ or γδ T cell receptors. Examples of TCRs include, but are not limited to, full-length TCRs, antigen-binding fragments of TCRs, soluble TCRs lacking transmembrane and cytoplasmic regions, single-chain TCRs containing variable regions of TCRs attached by a flexible linker, TCR chains linked by an engineered disulfide bond, single TCR variable domains, single peptide-MHC-specific TCRs, multi-specific TCRs (including bispecific TCRs), TCR fusions, TCRs comprising co-stimulatory regions, human TCRs, humanized TCRs, chimeric TCRs, recombinantly produced TCRs, and synthetic TCRs. In certain embodiments, the TCR is a full-length TCR comprising a full-length α chain and a full-length β chain. In certain embodiments, the TCR is a soluble TCR lacking transmembrane and/or cytoplasmic region(s). In certain embodiments, the TCR is a single-chain TCR (scTCR) comprising Vα and Vβ linked by a peptide linker, such as a scTCR having a structure as described in PCT Publication No.: WO 2003/020763, WO 2004/033685, or WO 2011/044186, each of which is incorporated by reference herein in its entirety. In certain embodiments, the TCR comprises a transmembrane region. In certain embodiment, the TCR comprises a co-stimulatory signaling region.

[0038] As used herein, the term “full-length TCR” refers to a TCR comprising a dimer of a first and a second polypeptide chain, each of which comprises a TCR variable region and a TCR constant region comprising a TCR transmembrane region and a TCR cytoplasmic region. In certain embodiments, the full-length TCR comprises one or two unmodified TCR chains, e.g., unmodified α, β, γ, or δ TCR chains. In certain embodiments, the full-length TCR comprises one or two altered TCR chains, such as chimeric TCR chains and/or TCR chains comprising one or more amino acid substitutions, insertions, or deletions relative to an unmodified TCR chain. In certain embodiments, the full-length TCR comprises a mature, full-length TCR α chain and a mature, full-length TCR β chain. In certain embodiments, the full-length TCR comprises a mature, full-length TCR γ chain and a mature, full-length TCR δ chain.

[0039] As used herein, the term “TCR variable region” refers to the portion of a mature TCR polypeptide chain (e.g., a TCR α chain or β chain) which is not encoded by the TRAC gene for TCR α chains, either the TRBC1 or TRBC2 genes for TCR β chains, the TRDC gene for TCR δ chains, or either the TRGC1 or TRGC2 gene for TCR γ chains. In some embodiments, the TCR variable region of a TCR α chain encompasses all amino acids of a mature TCR α chain polypeptide which are encoded by a TRAV and/or TRAJ gene, and the TCR variable region of a TCR β chain encompasses all amino acids of a mature TCR β chain polypeptide which are encoded by a TRBV, TRBD, and/or TRBJ gene (see, e.g., T cell receptor Factsbook, (2001) LeFranc and LeFranc, Academic Press, ISBN 0-12-441352-8, which is incorporated by reference herein in its entirety). TCR variable regions generally comprise framework regions (FR) 1, 2, 3 and 4 and complementarity determining regions (CDR) 1, 2 and 3.

[0040] As used herein, the terms “α chain variable region” and “Vα” are used interchangeably and refer to the variable region of a TCR α chain.

[0041] As used herein, the terms “β chain variable region” and “Vβ” are used interchangeably and refer to the variable region of a TCR β chain.

[0042] As used herein, the term “specifically binds to” refers to the ability of an antibody or TCR to preferentially bind to a particular antigen (e.g., a specific MHC-binding polypeptide, or MHC-binding polypeptide/MHC complex) as such binding is understood by one skilled in the art. For example, an antibody or TCR that specifically binds to an antigen can bind to other antigens, generally with lower affinity as determined by, e.g., BIAcore®, or other immunoassays known in the art (see, e.g., Savage et al., Immunity. 1999, 10(4):485-92, which is incorporated by reference herein in its entirety). In a specific embodiment, an antibody or TCR that specifically binds to an antigen binds to the antigen with an association constant (Kₐ) that is at least 10-fold, 50-fold, 100-fold, 500-fold, 1,000-fold, 5,000-fold, or 10,000-fold greater than the Kₐ when the antibody or TCR binds to another antigen.

[0043] As used herein, the terms “treat,” “treating,” and “treatment” refer to methods that generally involve administration of an agent (e.g., a polypeptide disclosed herein) to a subject having a disease or disorder, or predisposed to having such a disease or disorder, in order to cure, delay, reduce the severity of, or ameliorate one or more symptoms of the disease or disorder, or in order to prolong the survival of the subject beyond that expected in the absence of such treatment.

[0044] As used herein, the term “effective amount” in the context of the administration of a therapy to a subject refers to the amount of a therapy that achieves a desired prophylactic or therapeutic effect.

[0045] As used herein, the term “subject” includes any human or non-human animal.

### 6.2 Antigenic Polypeptides

[0046] In one aspect, the instant disclosure provides an antigenic polypeptide comprising a tumor-associated MHC-binding peptide. Exemplary MHC-binding peptides for use in the antigenic polypeptides disclosed herein are set forth in Table 1 herein.

TABLE 1
Amino acid sequences
of exemplary MHC-binding
peptides

| SEQ | |
|---|---|
| ID | |
| NO | Amino Acid Sequence |
| 98 | AELGRLsPRAY |
| 99 | AESImsFHI |
| 100 | AESIMsFHI |
| 101 | AEsLKSLSSEL |
| 102 | AEtPDIKLF |
| 103 | AGFsFVNPK |
| 104 | AHDPSGmFRSQsF |
| 105 | ALDSGAsLLHL |
| 106 | ALmGsPQLVAA |
| 107 | ALPPGSYAsL |
| 108 | ALPTPALsPSLM |
| 109 | ALSsSFLVL |
| 110 | ALSSsFLVL |
| 111 | ALStPVVEK |
| 112 | ALVDGyFRL |
| 113 | ALwsPGLAK |
| 114 | AmLGSKsPDPYRL |
| 115 | APAsPFRQL |
| 116 | APAsPLRPL |
| 117 | APAsPNHAGVL |
| 118 | APFHLtPTLY |
| 119 | APKsPSSEWL |
| 120 | APRtPPGVTF |
| 121 | APsSPDVKL |
| 122 | APSsPDVKL |
| 123 | APTsPLGHL |
| 124 | APVsPRPGL |
| 125 | ARFsGFYSm |
| 126 | ARFsGFYSM |
| 127 | ARFsPKVSL |
| 128 | ARGIsPIVF |
| 129 | ARYsGSYNDY |
| 130 | ASFKAELsY |
| 131 | ASFtPTSILK |
| 132 | ASFtPTSILKR |
| 133 | ASLsPSVSK |
| 134 | ATIsPPLQPK |
| 135 | AVILPPLsPYFK |
| 136 | AVLEyLKI |
| 137 | AVNQFsPSLAR |
| 138 | AVRNFsPTDYY |
| 139 | AVRNFSPtDYY |
| 140 | AWRRLsRDSGGY |
| 141 | AYGGLtSPGLSY |
| 142 | AYGGLTsPGLSY |
| 143 | AYSsYVHQY |
| 144 | CtFGSRQI |
| 145 | DFAsPFHER |
| 146 | DFHsPIVLGR |
| 147 | DIAsPTFRRL |
| 148 | DIIRQPsEEEIIK |
| 149 | DIKsVFEAF |
| 150 | DILsPRLIR |
| 151 | DIRRFsLTTLR |
| 152 | DIsPPIFRR |
| 153 | DLtLKKEKF |
| 154 | DMLGLtKPAMPM |
| 155 | DNFsPDLRVLR |
| 156 | DPFGRPTsF |
| 157 | DPLIRWDsY |
| 158 | DPSLDLHsL |
| 159 | DSDPmLsPRFY |
| 160 | DSDPMLsPRFY |
| 161 | DSDPmLsPRFYAY |
| 162 | DSDPMLsPRFYAY |
| 163 | DsGEGDFLAEGGGVR |
| 164 | DSKsPLGFY |
| 165 | DTIsLASERY |
| 166 | DTIsPTLGF |
| 167 | DTQSGsLLFIGR |
| 168 | DTsSLPTVIMR |
| 169 | DTSsLPTVImR |
| 170 | DTSsLPTVIMR |
| 171 | DTTsLRTLRI |
| 172 | DVAsPDGLGRL |
| 173 | DVAsPTLR |
| 174 | DVAsPTLRR |
| 175 | DVAsPTLRRL |
| 176 | DVIDsQELSKV |
| 177 | DVYSGtPTKV |
| 178 | DYSPYFKtI |
| 179 | EAsSPVPYL |
| 180 | EASsPVPYL |
| 181 | EEAPQtPVAF |
| 182 | EEDtYEKVF |
| 183 | EEFsPRQAQmF |
| 184 | EEFsPRQAQMF |
| 185 | EEIsPTKFPGL |
| 186 | EEIsPTKFPGLY |
| 187 | EELsPLALGRF |
| 188 | EELsPSTVLY |
| 189 | EELSPsTVLY |
| 190 | EELSPtAKF |
| 191 | EGPEtGYSL |
| 192 | EHERSIsPLLF |
| 193 | EIVNFsPIAR |
| 194 | ERLKIRGsL |
| 195 | ERVDSLVsL |
| 196 | ESFSDyPPLGRFA |
| 197 | ESLsPIGDmKV |
| 198 | ESLsPIGDMKV |
| 199 | ESVYKASLsL |
| 200 | ETRRPsYLEW |
| 201 | EVIRKGsITEY |
| 202 | EVIsQHLVSY |
| 203 | EVIsVLQKY |
| 204 | EVLERKIsM |
| 205 | FAFPGStNSL |
| 206 | FAFPGSTNsL |
| 207 | FASPtSPPVL |
| 208 | FASPTsPPVL |
| 209 | FATIKSAsL |
| 210 | FATIRTAsL |
| 211 | FAVsPIPGRGGVL |
| 212 | FAwsPLAGEKF |
| 213 | FAWsPLAGEKF |
| 214 | FAYsPGGAHGmL |
| 215 | FFFtARTSF |
| 216 | FGGQRLtL |
| 217 | FHGISTVsL |
| 218 | FHVtPLKL |
| 219 | FIVsPVPESRL |
| 220 | FKVsPLTFGR |
| 221 | FLDsAYFRL |
| 222 | FLDsGTIRGV |
| 223 | FLFsPPEVTGR |
| 224 | FLKPsTSGDSL |
| 225 | FLKPSTsGDSL |
| 226 | FLKPSTSGDsL |
| 227 | FLNEKARLsY |
| 228 | FLsRSIPSL |
| 229 | FPDNsDVSSIGRL |
| 230 | FPDNSDVSsIGRL |
| 231 | FPLMRSKsL |
| 232 | FPLsPTKLSQY |
| 233 | FPSMPsPRL |
| 234 | FQYSKSPsL |
| 235 | FRFsPMGVDHM |
| 236 | FRPPPLtPEDVGF |
| 237 | FRRPDIQYPDAtDE |
| 238 | FRRsDDMFTF |
| 239 | FRYSGKtEY |
| 240 | FSFKKsFKL |
| 241 | FSFsPGAGAFR |
| 242 | FSLRYsPGmDAY |
| 243 | FSLRYsPGMDAY |
| 244 | FSRPSMsPTPLDR |
| 245 | FSVDsPRIY |
| 246 | FTIFRTIsV |
| 247 | FtPPVVKR |
| 248 | FVLsPIKEPA |
| 249 | FVRsPGTGAF |
| 250 | FVtTPTAEL |
| 251 | FVTtPTAEL |
| 252 | FVTTPtAEL |
| 253 | FYYsPSGKKF |
| 254 | GALsRYLFR |
| 255 | GEDPLsPRAL |
| 256 | GELEsIGELF |
| 257 | GEmsPQRFF |
| 258 | GEMsPQRFF |
| 259 | GEmsPQRFFF |
| 260 | GENKsPLLL |
| 261 | GEPRAPtPPSGTEVTL |
| 262 | GEPsPPHDIL |
| 263 | GEtSPRTKIW |
| 264 | GETsPRTKITW |
| 265 | GEwsASLPHRF |
| 266 | GEwSAsLPHRF |
| 267 | GEWsASLPHRF |
| 268 | GEYsPGTALP |
| 269 | GGLTsPGLSY |
| 270 | GGSISVQVNSIKFDsE |
| 271 | GHGsPFPSL |
| 272 | GIFPGtPLKK |
| 273 | GIISsPLTGK |
| 274 | GIISSPLtGK |
| 275 | GImsPLAKK |
| 276 | GLFsPIRSSAF |
| 277 | GLLsLSALGSQAHL |
| 278 | GLPGGGsPTTFL |
| 279 | GLSsLSIHL |
| 280 | GLTsPGLSYSL |
| 281 | GLtVSIPGL |
| 282 | GMAILsLLLK |
| 283 | GPGHHHKPGLGEGtP |
| 284 | GPLSRVKsL |
| 285 | GPLVRQIsL |
| 286 | GPRAPSPtKPL |
| 287 | GPRsASLL |
| 288 | GPRSFtPLSI |
| 289 | GPRsPKAWL |
| 290 | GPRtPTQPLL |
| 291 | GRNsLSSLPTY |
| 292 | GRQSPsFKL |
| 293 | GSFAsPGRLF |
| 294 | GsFRGFPAL |
| 295 | GSKsPDPYRL |
| 296 | GSRsLYNLR |
| 297 | GTFPKALsI |
| 298 | GtPLSQAIIHQY |
| 299 | GTVtPPPRLVK |
| 300 | GTYVPSsPTRLAY |
| 301 | GVIKsPSWQR |
| 302 | GVIsPQELLK |
| 303 | GVIsPQELLKK |
| 304 | GVLsPDTISSK |
| 305 | GVmtPLIKR |
| 306 | GVMtPLIKR |
| 307 | HEFsSPSHLL |
| 308 | HEFSsPSHLL |
| 309 | HELsDITEL |
| 310 | HERSIsPLL |
| 311 | HFDsPPHLL |
| 312 | HHHKPGLGEGtP |
| 313 | HHPGLGEGtP |
| 314 | HKIsDYFEY |
| 315 | HLLEtTPKSE |
| 316 | HLLETtPKSE |
| 317 | HLLSPtKGI |
| 318 | HLNsLDVQL |
| 319 | HLPsPPLTQEV |
| 320 | HLSsFTMKL |
| 321 | HPIsPYEHL |
| 322 | HPIsPYEHLL |
| 323 | HPIsSEELL |
| 324 | HPISsEELL |
| 325 | HPIsSEELLSLKY |
| 326 | HPISsEELLSLKY |
| 327 | HPRPVPDsPVSVTRL |
| 328 | HPRsPNVLSVAL |
| 329 | HPsLSAPAL |
| 330 | HPSLsAPAL |
| 331 | HPTLQAPsL |
| 332 | HPYRNsDPVI |
| 333 | HQFsLKENw |
| 334 | HQGKFLQtF |
| 335 | HRAsKVLFL |
| 336 | HRDsFSRmSL |
| 337 | HRDsFSRMSL |
| 338 | HRNsmKVFL |
| 339 | HRVsVILKL |
| 340 | HSDKRRPPsAELY |
| 341 | HSLsLDDIRLY |
| 342 | HSVsPDPVL |
| 343 | HTIsPLDLA |
| 344 | HTIsPLDLAK |
| 345 | HTIsPLDLAKL |
| 346 | HTIsPSFQL |
| 347 | HTISPsFQL |
| 348 | HVSLITPtKR |
| 349 | HYFsPFRPY |
| 350 | HYsSRLGSAIF |
| 351 | HYSsRLGSAIF |
| 352 | HYSSRLGsAIF |
| 353 | IAATKsLSV |
| 354 | IEIERILsV |
| 355 | IFDLQKTsL |
| 356 | IIQsPSSTGLLK |
| 357 | ILGPPPPsFHL |
| 358 | ILLtDLII |
| 359 | IMKNLQAHyE |
| 360 | IPHQRSsL |
| 361 | IPKsKFLAL |
| 362 | IPMtPTSSF |
| 363 | IPMTPtSSF |
| 364 | IPRPLsLIG |
| 365 | IPRsFRHLSF |
| 366 | IPsmSHVHL |
| 367 | IPsMSHVHL |
| 368 | IPsPLQPEm |
| 369 | IPsPLQPEM |
| 370 | IPVSKPLsL |
| 371 | IPVsRDWEL |
| 372 | IRFGRKPsL |
| 373 | IRPsVLGPL |
| 374 | IRRsYFEVF |
| 375 | IRYSGHsL |
| 376 | ISKKLsFLSW |
| 377 | ISLDKLVsI |
| 378 | IsSLTTLSI |
| 379 | ISsLTTLSI |
| 380 | ISsSmHSLY |
| 381 | ISsSMHSLY |
| 382 | ISSsmHSLY |
| 383 | ITItPPEKY |
| 384 | ITLLsPKHKY |
| 385 | ItPPSSEKLVSVm |
| 386 | ItPPSSEKLVSVM |
| 387 | ITTsPITVR |
| 388 | ITTsPITVRK |
| 389 | ITYsPKLER |
| 390 | IVLPLsLQR |
| 391 | IVsSLRLAY |
| 392 | IVSsLRLAY |
| 393 | IYDsVKVYF |
| 394 | IYRSQsPHYF |
| 395 | KAFsESGSNLHAL |
| 396 | KAFsPVRSVR |
| 397 | KAFsPVRSVRK |
| 398 | KAItPPQQPY |
| 399 | KASsPGHPAF |
| 400 | KAVsFHLVH |
| 401 | KAVsLFL |
| 402 | KAYtPVVVTQW |
| 403 | KEDsFLQRY |
| 404 | KEmSPtRQL |
| 405 | KEsEVFYEL |
| 406 | KEsTLHLVL |
| 407 | KEStLHLVL |
| 408 | KFLsPAQYLY |
| 409 | KFRDLsPPRY |
| 410 | KFsLRAAEF |
| 411 | KGFsGTFQL |
| 412 | KIFERATsF |
| 413 | KIFsKQQGKAFQR |
| 414 | KIIsIFSG |
| 415 | KIIsIFSGTEK |
| 416 | KIKsLEEIYL |
| 417 | KINsLAHLR |
| 418 | KISsFTSLK |
| 419 | KISSFtSLK |
| 420 | KISSFTsLK |
| 421 | KISsLEIKL |
| 422 | KKLsLLNGGL |
| 423 | KLEGPDVsL |
| 424 | KLFHGsLEEL |
| 425 | KLFPGsPAIY |
| 426 | KLHsLIGLGI |
| 427 | KLIDIVSsQKV |
| 428 | KLKsFTYEY |
| 429 | KLLDFGsLSNL |
| 430 | KLLEGEESRIsL |
| 431 | KLLsPILARY |
| 432 | KLLsTALHV |
| 433 | KLLsYIQRL |
| 434 | KLMsDVEDVSL |
| 435 | KLMsLGDIRL |
| 436 | KLmsPKADVKL |
| 437 | KLMsPVLKQHL |
| 438 | KLQEFsKEE |
| 439 | KLRIQtDGDKY |
| 440 | KLSsGLLPKL |
| 441 | KLwtLVSEQTRV |
| 442 | KLWtLVSEQTRV |
| 443 | KLYRPGsVAY |
| 444 | KLYsISSQV |
| 445 | KLYsPTSKAL |
| 446 | KLYSPtSKAL |
| 447 | KLYTyIQSR |
| 448 | KLYTyIQSRF |
| 449 | KmDsFLDMQL |
| 450 | KMDsFLDmQL |
| 451 | KmsSYAFFV |
| 452 | KmSsYAFFV |
| 453 | KMsSYAFFV |
| 454 | KMSsYAFFV |
| 455 | KmsSYAFFVQT |
| 456 | KmSsYAFFVQT |
| 457 | KMsSYAFFVQT |
| 458 | KMSsYAFFVQT |
| 459 | KPAsPARRLDL |
| 460 | KPDKTLRFsL |
| 461 | KPHsPVTGLYL |
| 462 | KPLsRVTSL |
| 463 | KPPsPGTVL |
| 464 | KPPSPGtVL |
| 465 | KPRPLsmDL |
| 466 | KPRSIsFPSA |
| 467 | KPSSLRRVtI |
| 468 | KPSsPRGSLLL |
| 469 | KQKsLTNLSF |
| 470 | KQKSLtNLSF |
| 471 | KRAsALLNL |
| 472 | KRAsYELEF |
| 473 | KRDsFIGTPY |
| 474 | KRFsLDFNL |
| 475 | KRIsIFLSM |
| 476 | KRIsISTSGGSF |
| 477 | KRLGsLVDEF |
| 478 | KRLsVELTSSL |
| 479 | KRLsVELTSSLF |
| 480 | KRLsVERIYQK |
| 481 | KRMsFVMEY |
| 482 | KRNsDLLLL |
| 483 | KRPsSEDFVF |
| 484 | KRPsSEDFVFL |
| 485 | KRPSsEDFVFL |
| 486 | KRRtGALVL |
| 487 | KRSsISQLL |
| 488 | KRVsTFQEF |
| 489 | KRVtWIVEF |
| 490 | KRYLFRsF |
| 491 | KRYsRSLTI |
| 492 | KSAsFAFEF |
| 493 | KSDGsFIGY |
| 494 | KSFsAPATQAY |
| 495 | KSGELLAtw |
| 496 | KSGEPLStW |
| 497 | KSKsIEITF |
| 498 | KsLPSDQVmL |
| 499 | KsLPSDQVML |
| 500 | KSLsIEIGHEV |
| 501 | KSLSPsLLGY |
| 502 | KSSEEKRLSIsKF |
| 503 | KSSsLPRAF |
| 504 | KSVtPTKEFL |
| 505 | KTDsDSDLQLY |
| 506 | KTIsESDLNHSF |
| 507 | KTIsPKSTVY |
| 508 | KTKsMFFFL |
| 509 | KTLsLVKEL |
| 510 | KTmsGTFLL |
| 511 | KTmSGtFLL |
| 512 | KTMSGtFLL |
| 513 | KTmsGTFLLRF |
| 514 | KTMsGTFLLRF |
| 515 | KtMSPSQMIM |
| 516 | KTQRVsLLF |
| 517 | KtRSLSVEIVY |
| 518 | KTRsLSVEIVY |
| 519 | KTVsPPIRKGW |
| 520 | KTVsSTKLVSF |
| 521 | KVDGPRSPsY |
| 522 | KVEsPPLEEw |
| 523 | KVFsLPTQL |
| 524 | KVFsPVIRSSF |
| 525 | KVGsFKFIYV |
| 526 | KVLswPFLm |
| 527 | KVLswPFLM |
| 528 | KWPsKRRIPV |
| 529 | KYRsVISDIF |
| 530 | LAFPsPEKLLR |
| 531 | LAsDRCSIHL |
| 532 | LEIKEsILSL |
| 533 | LEIsPDNSL |
| 534 | LEIsVGKSV |
| 535 | LEsPTTPLL |
| 536 | LESPtTPLL |
| 537 | LESPTtPLL |
| 538 | LGFEVKsKmV |
| 539 | LGFEVKsKMV |
| 540 | LGmEVLsGV |
| 541 | LGMEVLsGV |
| 542 | LIPDHtIRA |
| 543 | LLDIIRsL |
| 544 | LLDPRSYHtY |
| 545 | LLsPKHKY |
| 546 | LPAsPRARLSA |
| 547 | LPAsPSVSL |
| 548 | LPASPsVSL |
| 549 | LPDPGsPRL |
| 550 | LPEsPRLTL |
| 551 | LPFSGPREPsL |
| 552 | LPFSsSPSRSA |
| 553 | LPFSSsPSRSA |
| 554 | LPLsSSHLNVY |
| 555 | LPLSsSHLNVY |
| 556 | LPLSSsHLNVY |
| 557 | LPPVsPLKAA |
| 558 | LPRGLsPARQL |
| 559 | LPRGSSPsVL |
| 560 | LPRPLsPTKL |
| 561 | LPRPLSPtKL |
| 562 | LPRRLsDSPVF |
| 563 | LPRRLSDsPVF |
| 564 | LPRsPPLKVL |
| 565 | LPRsSRGLL |
| 566 | LPRSsRGLL |
| 567 | LPRSSsmAAGL |
| 568 | LPSARPLsL |
| 569 | LPsRLTKc |
| 570 | LPTsPLAm |
| 571 | LPtSPLAmEY |
| 572 | LPtSPLAMEY |
| 573 | LPTsPLAmEY |
| 574 | LPTsPLAMEY |
| 575 | LPVsPGHRKT |
| 576 | LPYPVsPKQKY |
| 577 | LQHSFsFAGF |
| 578 | LQIsPVSSY |
| 579 | LSKsSATLw |
| 580 | LSPtKLPSI |
| 581 | LSRTFKsLF |
| 582 | LsSSVIREL |
| 583 | LSsSVIREL |
| 584 | LTAsQILSR |
| 585 | LTDPsSPTISSY |
| 586 | LTDPSSPtISSY |
| 587 | LTKtLIKL |
| 588 | LVAsPRLEK |
| 589 | LVREPGsQAcL |
| 590 | mIIsPERLDPF |
| 591 | MIIsPERLDPF |
| 592 | MLPsPNEKL |
| 593 | MPFPAHLtY |
| 594 | mPHsPTLRV |
| 595 | mPHSPtLRV |
| 596 | MPHsPTLRV |
| 597 | MPHSPtLRV |
| 598 | MPKFRMPsL |
| 599 | MPQDLRsPA |
| 600 | mPREPsATRL |
| 601 | mPRQPsATRL |
| 602 | mPsPATLSHSL |
| 603 | MPsPATLSHSL |
| 604 | MPsPFRSSAL |
| 605 | mPsPGGRITL |
| 606 | MPsPGGRITL |
| 607 | MPsPIMHPLIL |
| 608 | MPsPLKGQHTL |
| 609 | MPsPSTLKKEL |
| 610 | mPsPVSPKL |
| 611 | mPSPVsPKL |
| 612 | MPsPVSPKL |
| 613 | MPSPVsPKL |
| 614 | MPtSPGVDL |
| 615 | MPTsPGVDL |
| 616 | mRLsRELQL |
| 617 | MSKLINHt |
| 618 | mTKSsPLKI |
| 619 | NAIsLPTI |
| 620 | NAVsPSSGPSL |
| 621 | NAWsPVMRAR |
| 622 | NHVtPPNVSL |
| 623 | NIPsFIVRL |
| 624 | NLLsPDGKmISV |
| 625 | NmDsPGPML |
| 626 | NMDsPGPmL |
| 627 | NPIHsPSYPL |
| 628 | NPIHSPsYPL |
| 629 | NPsSPEFFm |
| 630 | NPsSPEFFM |
| 631 | NPSsPEFFm |
| 632 | NPSsPEFFM |
| 633 | NQGsPFKSAL |
| 634 | NREsFQIFL |
| 635 | NRFsGGFGARDY |
| 636 | NRFsPKASL |
| 637 | NRHsLPFSL |
| 638 | NRHsLVEKL |
| 639 | NRLsLLVQK |
| 640 | NRMsRRIVL |
| 641 | NRSLHINNIsPGNTIS |
| 642 | NRSsPVHII |
| 643 | NSISSVVsR |
| 644 | NSLsPRSSL |
| 645 | NSVsPSESL |
| 646 | NVLsPLPSQ |
| 647 | NVLsPLPSQAM |
| 648 | NVMKRKFsL |
| 649 | PEFPLsPPKK |
| 650 | PEVsPRPAL |
| 651 | PIFSRLsI |
| 652 | PVSKPLsL |
| 653 | QEAsPRPLL |
| 654 | QLMtLENKL |
| 655 | QLPsPTATSQL |
| 656 | QPRNSLPAsPAHQL |
| 657 | QPRTPsPLVL |
| 658 | QRVPsYDSF |
| 659 | QSIsFSGLPSGR |
| 660 | QSSsWTRVF |
| 661 | QTIsPLSTY |
| 662 | QTPDFtPTKY |
| 663 | QTPsPRLAL |
| 664 | QTRRPsYLEW |
| 665 | RAAsIENVL |
| 666 | RAAsSPDGFFw |
| 667 | RAASsPDGFFw |
| 668 | RAAtPLPSL |
| 669 | RAAtPTLTTF |
| 670 | RAATPtLTTF |
| 671 | RAGsFSRFY |
| 672 | RAHtPTPGIYm |
| 673 | RAHtPTPGIYM |
| 674 | RAHTPtPGIYM |
| 675 | RALsHADLF |
| 676 | RALsLTRAL |
| 677 | RANsFVGTAQY |
| 678 | RAPsYRTLEL |
| 679 | RARsPVLWGW |
| 680 | RAsSLNFLNK |
| 681 | RASsLNFLNK |
| 682 | RAtSNVFAm |
| 683 | RAtSNVFAM |
| 684 | RATsNVFAm |
| 685 | RATsNVFAM |
| 686 | RAtSNVFAmF |
| 687 | RAtSNVFAMF |
| 688 | RATsNVFAmF |
| 689 | RATsNVFAMF |
| 690 | RATsPLVSLY |
| 691 | RAVsPFAKI |
| 692 | RAVsPHFDDm |
| 693 | RAVsPHFDDM |
| 694 | RAYsPLHGGSGSY |
| 695 | REAPsPLm |
| 696 | REAPsPLM |
| 697 | REAsIELPSm |
| 698 | REDsLEFSL |
| 699 | REDSLEFL |
| 700 | REFSGPStPTGTL |
| 701 | REFSGPSTPtGTL |
| 702 | REImGtPEYL |
| 703 | RELsAPARLY |
| 704 | RELsGTIKEIL |
| 705 | RELsPSSLKm |
| 706 | RELsPVSFQY |
| 707 | REPsESSPLAL |
| 708 | REPSESsPLAL |
| 709 | REPsPLPELAL |
| 710 | REPsPVRYDNL |
| 711 | RERAFsVKF |
| 712 | REsPIPIEI |
| 713 | REsPRPLQL |
| 714 | RESsLGFQL |
| 715 | RETNLDsLPL |
| 716 | RETsMVHEL |
| 717 | RETsPNRIGL |
| 718 | REVsPEPIV |
| 719 | RFQsmPVRL |
| 720 | RFQsMPVRL |
| 721 | RHKsDSISL |
| 722 | RHLPsPPTL |
| 723 | RIGsDPLAY |
| 724 | RIIEtPPHRY |
| 725 | RIKLGDyHFY |
| 726 | RILFsPFFH |
| 727 | RILsATTSGIFL |
| 728 | RILsDVTHSAV |
| 729 | RILsGVVTKm |
| 730 | RILsGVVTKM |
| 731 | RILsGVVTKMKM |
| 732 | RIMsPMRTGNTY |
| 733 | RIQsPLNNKL |
| 734 | RIRsIEALL |
| 735 | RItSLIVHV |
| 736 | RITsPVHVSF |
| 737 | RIVsPKNSDLK |
| 738 | RIWsPTIGR |
| 739 | RIWSPtIGR |
| 740 | RIYsRIDRLEA |
| 741 | RKFsAPGQL |
| 742 | RKLsFTESL |
| 743 | RKLSFtESL |
| 744 | RKLsGDQITL |
| 745 | RKLsVALAF |
| 746 | RKLsVLLLL |
| 747 | RKNsFVmEY |
| 748 | RKNsFVEY |
| 749 | RKNsLISSL |
| 750 | RKSsIIIRm |
| 751 | RLAsLFSSL |
| 752 | RLAsLMNLGM |
| 753 | RLAsYLEKV |
| 754 | RLDsELKEL |
| 755 | RLDsGHVWKL |
| 756 | RLFsKELRc |
| 757 | RLFsKSIETL |
| 758 | RLFsSFLKR |
| 759 | RLIsLSEQNL |
| 760 | RLISLsEQNL |
| 761 | RLIsQIVSS |
| 762 | RLIsQIVSSITA |
| 763 | RLIsVVSHL |
| 764 | RLKsIEERQLLK |
| 765 | RLLQDsVDFSL |
| 766 | RLLQDsVDSL |
| 767 | RLLsAAENF |
| 768 | RLLsEKILGL |
| 769 | RLLsIKEAFRL |
| 770 | RLLsVNIRV |
| 771 | RLNsPPSSIYK |
| 772 | RLPLPsPAL |
| 773 | RLPsDPFTHL |
| 774 | RLPsPTSPFSSL |
| 775 | RLPSsTLKR |
| 776 | RLPtVLLKL |
| 777 | RLQHSFsF |
| 778 | RLRsSVPGV |
| 779 | RLRSsVPGV |
| 780 | RLRsYEDmI |
| 781 | RLsPVPVPR |
| 782 | RLsSVSVTY |
| 783 | RLSsVSVTY |
| 784 | RLWtPPEDYRL |
| 785 | RLYKsEPEL |
| 786 | RLYsVSYLL |
| 787 | RmIsHSELRKL |
| 788 | RMIsHSELRKL |
| 789 | RMIsKLEAQV |
| 790 | RmKsPFGSSF |
| 791 | RMKsPFGSSF |
| 792 | RmLsLRDQRL |
| 793 | RmYsFDDVL |
| 794 | RNAsLERVL |
| 795 | RPADSAQLLsL |
| 796 | RPARsVPSIAA |
| 797 | RPAsPALLL |
| 798 | RPAsPLMI |
| 799 | RPASPsLQL |
| 800 | RPFHGISTVsLPNSL |
| 801 | RPFsKPEIAL |
| 802 | RPFsREMDL |
| 803 | RPHLSGRKLsL |
| 804 | RPHtPTPGI |
| 805 | RPHtPTPGIYm |
| 806 | RPHTPtPGIYM |
| 807 | RPIsPRIGA |
| 808 | RPIsVIGGVS |
| 809 | RPItPVYTV |
| 810 | RPItPVYTVA |
| 811 | RPKLHHSLsF |
| 812 | RPKPSSsPVI |
| 813 | RPKPSsSPVIF |
| 814 | RPKPSSsPVIF |
| 815 | RPKPsSSPVIFA |
| 816 | RPKPSsSPVIFA |
| 817 | RPKPSSsPVIFA |
| 818 | RPKsTPELAF |
| 819 | RPKtPPPAP |
| 820 | RPLsKQLSA |
| 821 | RPLsLIQGPP |
| 822 | RPLsPFYL |
| 823 | RPLsPFYLSA |
| 824 | RPLsPGALQL |
| 825 | RPLsPILHIV |
| 826 | RPLsPKPSSPG |
| 827 | RPLsPKPSSPGSVL |
| 828 | RPLSPKPsSPGSVL |
| 829 | RPLsPTRLQPAL |
| 830 | RPLtPRTPA |
| 831 | RPNsLVGITSA |
| 832 | RPNSPsPTAL |
| 833 | RPNsSALETL |
| 834 | RPNSALETL |
| 835 | RPPsPGLRGLL |
| 836 | RPQESRsLSPSHL |
| 837 | RPQESRSLsPSHL |
| 838 | RPQsPPAEAVI |
| 839 | RPQtPKEEAQAL |
| 840 | RPRAFsHSGVHSL |
| 841 | RPRAFsIASSL |
| 842 | RPREVtVSL |
| 843 | RPRFMsSPVL |
| 844 | RPRFMSsPVL |
| 845 | RPRGPsPLVTm |
| 846 | RPRGPsPLVTM |
| 847 | RPRLQHsFSF |
| 848 | RPRLQHSFsF |
| 849 | RPRPSsVLRTL |
| 850 | RPRPVsPSSLLDTAI |
| 851 | RPRSIsVEEF |
| 852 | RPRSLSsPTVTL |
| 853 | RPRsPNmQDL |
| 854 | RPRsPPEPLRV |
| 855 | RPRSPtGPSNSF |
| 856 | RPRtLRTRL |
| 857 | RPsSAPDLm |
| 858 | RPsSAPDLM |
| 859 | RPSsAPDLm |
| 860 | RPSsAPDLM |
| 861 | RPsSGFYEL |
| 862 | RPsSGQDLF |
| 863 | RPSsGQDLF |
| 864 | RPSsLRQYL |
| 865 | RPSsPLIDIKP |
| 866 | RPsSPVHVAF |
| 867 | RPSsPVHVAF |
| 868 | RPSsPVTVTAL |
| 869 | RPSsRVALmVL |
| 870 | RPSsRVALMVL |
| 871 | RPStPHTITL |
| 872 | RPsTPTINVL |
| 873 | RPStPTINVL |
| 874 | RPSTPtINVL |
| 875 | RPtSFADEL |
| 876 | RPTsISWDGL |
| 877 | RPTSIsWDGL |
| 878 | RPTsPRLLTL |
| 879 | RPVDPRRRsL |
| 880 | RPVsEMFSL |
| 881 | RPVsMDARIQV |
| 882 | RPVsPGKDITA |
| 883 | RPVStDFAQY |
| 884 | RPVtPITNF |
| 885 | RPVtPPRTA |
| 886 | RPwsNSRGL |
| 887 | RPwsPAVSA |
| 888 | RPYPsPGAVL |
| 889 | RQAsIELPSMA |
| 890 | RQAsIELPSmAV |
| 891 | RQAsIELPSmAVA |
| 892 | RQAsIELPSmAVAST |
| 893 | RQAsIELPSMAVAST |
| 894 | RQASLsISV |
| 895 | RQFDEESLEsF |
| 896 | RQFTSSSsI |
| 897 | RQHFsPLSL |
| 898 | RQIQPsPPwSY |
| 899 | RQIQPsPPWSY |
| 900 | RQIsIRGIVGV |
| 901 | RQIsISEPQA |
| 902 | RQIsISEPQAF |
| 903 | RQIsISEPQAFL |
| 904 | RQIsISEPQAFLF |
| 905 | RQIsPEEFEY |
| 906 | RQKsPLFQFA |
| 907 | RQPsEEEII |
| 908 | RQPsEEEIIKL |
| 909 | RQPsWDPSPV |
| 910 | RQRSLsTSGESLY |
| 911 | RQVsEDPDIDSL |
| 912 | RRAsLSDIGF |
| 913 | RRFRFPsGAEL |
| 914 | RRFsDFLGL |
| 915 | RRFSFsGNTL |
| 916 | RRFsGLLN |
| 917 | RRFsGLLNc |
| 918 | RRFsGLLNC |
| 919 | RRFsGLSAEL |
| 920 | RRFsLDTDY |
| 921 | RRFsPPRRML |
| 922 | RRFsVTLRL |
| 923 | RRFtEIYEF |
| 924 | RRFtPPSTAL |
| 925 | RRGsFDA |
| 926 | RRGsFDAT |
| 927 | RRGsFDATG |
| 928 | RRGsFDATGSG |
| 929 | RRGsFDATGSGF |
| 930 | RRGsFDATGSGFSM |
| 931 | RRGsFDATGSGFSmTF |
| 932 | RRGsFDATGSGFSMTF |
| 933 | RRGsFEVTLL |
| 934 | RRGsGPEIFTF |
| 935 | RRGsPEMPFY |
| 936 | RRIDIsPSTFRK |
| 937 | RRIDISPsTLRK |
| 938 | RRISLtKRL |
| 939 | RRLDRRwtL |
| 940 | RRLDRRWtL |
| 941 | RRLsFQAEYW |
| 942 | RRLsLFLVL |
| 943 | RRLsVLVDDY |
| 944 | RRMsVGDRAG |
| 945 | RRMsVGDRAGSLPNY |
| 946 | RRNsLRIIF |
| 947 | RRPsQNAISFF |
| 948 | RRPtLTTFF |
| 949 | RRsDSLLSF |
| 950 | RRSDsLLSF |
| 951 | RRSIIsPNF |
| 952 | RRsSFSMEEGDVL |
| 953 | RRSsFSMEEGDVL |
| 954 | RRsSIPITV |
| 955 | RRSsISSWL |
| 956 | RRsSLLSLm |
| 957 | RRsSLLSLM |
| 958 | RRSsLLSLm |
| 959 | RRsSYLLAI |
| 960 | RRSsYLLAI |
| 961 | RRsTGVSFW |
| 962 | RRStGVSFW |
| 963 | RRTsIHDFL |
| 964 | RRVsLSEIGF |
| 965 | RRVsSNGIFDL |
| 966 | RRVSsNGIFDL |
| 967 | RRYsDFAKL |
| 968 | RSELLsFIK |
| 969 | RSFsADNFIGIQR |
| 970 | RSFsGLIKR |
| 971 | RSFsMHDLTTI |
| 972 | RSFsPKSPLEL |
| 973 | RSFsPTmKV |
| 974 | RSFSPtMKV |
| 975 | RSFtPLSI |
| 976 | RSFtPLSILK |
| 977 | RSHsPPLKL |
| 978 | RSIRDsGYID |
| 979 | RSIRDsGYIDcw |
| 980 | RSIRDsGYIDcW |
| 981 | RSISAsDLTF |
| 982 | RSIsNEGLTL |
| 983 | RSIsPLLF |
| 984 | RSIsPWLAR |
| 985 | RSIsQSSTDSY |
| 986 | RSIsSLLRF |
| 987 | RSIsTPTcL |
| 988 | RSKsVIEQV |
| 989 | RSKsVIEQVSW |
| 990 | RSLsFSDEM |
| 991 | RSLsPFRRH |
| 992 | RSLsPIIGKDVL |
| 993 | RSLsPILPGR |
| 994 | RSLsPmSGL |
| 995 | RSLsPMSGL |
| 996 | RSLsPSSNSAF |
| 997 | RsLSQELVGV |
| 998 | RsLSVEIVY |
| 999 | RSLsVGSEF |
| 1000 | RSLsVPVDL |
| 1001 | RSLsVPVDLSRW |
| 1002 | RSLtHPPTI |
| 1003 | RSmDSVLtL |
| 1004 | RSMDSVLtL |
| 1005 | RSNsPLPSI |
| 1006 | RSPsFGEDYY |
| 1007 | RSPsQDFSF |
| 1008 | RSQsLPNSL |
| 1009 | RSRsAPPNLW |
| 1010 | RSRsFDYNY |
| 1011 | RSRsFDYNYR |
| 1012 | RSRsFSGLIKR |
| 1013 | RSRSFsGLIKR |
| 1014 | RSRsPFSTTR |
| 1015 | RSRsPLELEPEAK |
| 1016 | RSRsPLGFYV |
| 1017 | RSRsPLLKF |
| 1018 | RSRsPSDSAAYF |
| 1019 | RSRsVPVSF |
| 1020 | RSSsFKDFAK |
| 1021 | RSSsFSDTL |
| 1022 | RSsSFVLPK |
| 1023 | RSSsFVLPK |
| 1024 | RsSSFVLPKL |
| 1025 | RSsSFVLPKL |
| 1026 | RSSsFVLPKL |
| 1027 | RsSSLSDFSw |
| 1028 | RsSSLSDFSW |
| 1029 | RSsSLSDFSw |
| 1030 | RSsSLSDFSW |
| 1031 | RSSsLSDFSw |
| 1032 | RSSsLSDFSW |
| 1033 | RsSSPFLSK |
| 1034 | RSsSPFLSK |
| 1035 | RSSsPPILTK |
| 1036 | RSsSTELLSHY |
| 1037 | RSSsTELLSHY |
| 1038 | RSSsWGRTY |
| 1039 | RSStPLPTI |
| 1040 | RsTSLSLKY |
| 1041 | RStSLSLKY |
| 1042 | RSTsLSLKY |
| 1043 | RSVsFKLLERW |
| 1044 | RSVsPVQDL |
| 1045 | RSVsVATGL |
| 1046 | RSWsPPPEVSR |
| 1047 | RSYRTDIsM |
| 1048 | RTAsPPALPK |
| 1049 | RTFsDESNVL |
| 1050 | RtFSLDTIL |
| 1051 | RTFsLDTILSSY |
| 1052 | RTFSPtYGL |
| 1053 | RtHSLLLLL |
| 1054 | RtISAQDTLAY |
| 1055 | RTIsAQDTLAY |
| 1056 | RTIsNPEVVmK |
| 1057 | RTIsNPEVVMK |
| 1058 | RTKsFLNYY |
| 1059 | RTLsESFSRIALK |
| 1060 | RTLsGSILDVY |
| 1061 | RtmSEAALVRK |
| 1062 | RtMSEAALVRK |
| 1063 | RTmsPIQVL |
| 1064 | RTMsPIQVL |
| 1065 | RTPsPARPAL |
| 1066 | RTRLsPPRA |
| 1067 | RTVsPAHVL |
| 1068 | RTYsFTSAm |
| 1069 | RTYsFTSAM |
| 1070 | RVASPtSGV |
| 1071 | RVDSLVsL |
| 1072 | RVDsTTcLF |
| 1073 | RVDStTcLF |
| 1074 | RVDSTtcLF |
| 1075 | RVIsLEDFMEK |
| 1076 | RVKTPtSQSY |
| 1077 | RVKVDGPRsPSY |
| 1078 | RVKVDGPRSPsY |
| 1079 | RVLsPLmSR |
| 1080 | RVLsPLMSR |
| 1081 | RVPsINQKI |
| 1082 | RVRsFLRGLP |
| 1083 | RVRsPGTGAF |
| 1084 | RVsSLTLHL |
| 1085 | RVSsLTLHL |
| 1086 | RVSSLtLHL |
| 1087 | RVVLtPLKV |
| 1088 | RVVsPGIDL |
| 1089 | RVYsLDDIRRY |
| 1090 | RVYsRFEVF |
| 1091 | RVYYsPPVARR |
| 1092 | RWNsKENLL |
| 1093 | RYARYsPRQR |
| 1094 | RYDsRTTIF |
| 1095 | RYFKtPRKF |
| 1096 | RYHsLAPmYY |
| 1097 | RYHsLAPMYY |
| 1098 | RYtNRVVTL |
| 1099 | SAFsSRGSLSL |
| 1100 | sAISPTPEI |
| 1101 | SAIsPTPEI |
| 1102 | SAYGGLTsPGLSY |
| 1103 | SEAsLASAL |
| 1104 | SEFKAmDsI |
| 1105 | SEFsDVDKL |
| 1106 | SEIsPIKGSVR |
| 1107 | SELRsPRISY |
| 1108 | SELtPSESL |
| 1109 | SELTPsESL |
| 1110 | SEsSIKKKFL |
| 1111 | SESsIKKKFL |
| 1112 | SFDsREASF |
| 1113 | SFLsQDESHDHSF |
| 1114 | sGEGDFLAEGGGVR |
| 1115 | SGFRsPHLw |
| 1116 | SGFRsPHLW |
| 1117 | SIDIsQDKL |
| 1118 | sIDSPKSYI |
| 1119 | SIFRtPISK |
| 1120 | SIIKEKtV |
| 1121 | SIIsPKVKMAL |
| 1122 | SIIsPNFSF |
| 1123 | SILsRTPSV |
| 1124 | sIPSLVDGF |
| 1125 | SIPsLVDGF |
| 1126 | SIPTVsGQI |
| 1127 | SISsIDREL |
| 1128 | SISsmEVNV |
| 1129 | SIsTLVTL |
| 1130 | SIStLVTL |
| 1131 | SItSLEAII |
| 1132 | SIVsPRKLPAL |
| 1133 | SKMAFLtRVA |
| 1134 | SLAsKVTRL |
| 1135 | SLAsLLAKV |
| 1136 | SLDsPGPEKmAL |
| 1137 | SLDsPGPEKMAL |
| 1138 | SLFGsPVAK |
| 1139 | SLFHtPKFV |
| 1140 | SLFSsEESNLGA |
| 1141 | SLLsELQHA |
| 1142 | SLLsLSATV |
| 1143 | SLLsVSHAL |
| 1144 | SLLtPVRLPSI |
| 1145 | SLmsGTLESL |
| 1146 | SLmSGtLESL |
| 1147 | SLMSGtLESL |
| 1148 | SLSsERYYL |
| 1149 | SLsSLRAHLEY |
| 1150 | SLSsLRAHLEY |
| 1151 | SmKsPLYLVSR |
| 1152 | SMKsPLYLVSR |
| 1153 | SPAARSLsL |
| 1154 | SPAsPLKEL |
| 1155 | SPDIsPPIFRR |
| 1156 | SPFKRQLs |
| 1157 | SPFLSKRsL |
| 1158 | SPFSSRsPSL |
| 1159 | SPGsPWKTKL |
| 1160 | sPHSPFYQL |
| 1161 | SPHsPFYQL |
| 1162 | SPIsDEEERL |
| 1163 | SPIsPRTQDAL |
| 1164 | SPIsPTRQDAL |
| 1165 | SPITSsPPKW |
| 1166 | SPKPPtRSP |
| 1167 | SPKPPTRsP |
| 1168 | SPPsPARWSL |
| 1169 | SPRAGsPF |
| 1170 | SPRAGsPFSPPPSSSS |
| | L |
| 1171 | SPRLVsRSSSVL |
| 1172 | SPRPPNSPsI |
| 1173 | SPRPPNsPSISI |
| 1174 | SPRPtSAPAI |
| 1175 | SPRPTsAPAI |
| 1176 | SPRRPsRVSEF |
| 1177 | SPRRPsRVSEFL |
| 1178 | sPRSPISPEL |
| 1179 | SPRsPISPEL |
| 1180 | sPRSPSTTYL |
| 1181 | SPRsPTTTL |
| 1182 | SPRsPVNKTTL |
| 1183 | sPRSPVPTTL |
| 1184 | SPRsPVPTTL |
| 1185 | sPRTPPPLTV |
| 1186 | SPRtPPPLTV |
| 1187 | SPRTPtPFKHAL |
| 1188 | SPRtPVSPVKF |
| 1189 | SPsPLPVAL |
| 1190 | SPsPmDPHM |
| 1191 | SPsPMDPHm |
| 1192 | SPsPMDPHM |
| 1193 | SPtSPDYSL |
| 1194 | SPtSPFSSL |
| 1195 | SPTsPFSSL |
| 1196 | SPVNKVRRVsF |
| 1197 | SPVsPKSLAF |
| 1198 | SPVsPmKEL |
| 1199 | SQDsPIFm |
| 1200 | SQDsPIFM |
| 1201 | SQILRTPsL |
| 1202 | SRFHsPSTTW |
| 1203 | SRFsGGFGA |
| 1204 | SRFsGGFGARDY |
| 1205 | SRHsGPFFTF |
| 1206 | SRKEsYSVYVY |
| 1207 | SRKsFVFEL |
| 1208 | SRLsLRR |
| 1209 | SRLsLRRSL |
| 1210 | SRPSmsPTPL |
| 1211 | SRPSMsPTPL |
| 1212 | SRRsIFEMY |
| 1213 | SRSsPLKL |
| 1214 | SSIsPSTLTLK |
| 1215 | SSLsGEELVTK |
| 1216 | SSLSsPLNPK |
| 1217 | SSSsPFKFK |
| 1218 | STAsAITPSVSR |
| 1219 | STGGGTVIsR |
| 1220 | STsLEKNNV |
| 1221 | SVFsPSFGLK |
| 1222 | SVIsDDSVL |
| 1223 | SVIsGISSR |
| 1224 | SVISsPLLK |
| 1225 | SVLsPLLNK |
| 1226 | SVLsPTSWEK |
| 1227 | SVLsYTSVR |
| 1228 | SVLtPLLLR |
| 1229 | SVPEFPLsPPKK |
| 1230 | SVQsDQGYISR |
| 1231 | SVSsLEVHF |
| 1232 | SVTsPIKmK |
| 1233 | SVIsPIKMK |
| 1234 | SVVsFDKVKEPR |
| 1235 | SVVsGSEMSGKY |
| 1236 | SVYsPSGPVNR |
| 1237 | SVYSPsGPVNR |
| 1238 | SYPsPVPTSF |
| 1239 | SYVTTSTRTYsLG |
| 1240 | SYYsPSIGFSY |
| 1241 | TAIsPPLSV |
| 1242 | TELPKRLsL |
| 1243 | TESsPGSRQIQLw |
| 1244 | TESsPGSRQIQLW |
| 1245 | TEVsPSRTI |
| 1246 | THALPEsPRL |
| 1247 | THDsPFcL |
| 1248 | THIsPNAIF |
| 1249 | THIsPNAIFKA |
| 1250 | TIFsPEGRLY |
| 1251 | TImsPAVLK |
| 1252 | TIMsPAVLK |
| 1253 | TIRSPtTVL |
| 1254 | TLAsPSVFK |
| 1255 | TLLAsPmLK |
| 1256 | TLLsAAHEVEL |
| 1257 | TLLsPKHKY |
| 1258 | TLPsPDKLPGF |
| 1259 | TLSCPVtEVI |
| 1260 | TLsSIRHMI |
| 1261 | TLSsIRHmI |
| 1262 | TLSsIRHMI |
| 1263 | TLYPRSFsV |
| 1264 | TmFLRETsL |
| 1265 | TMFLREtSL |
| 1266 | TMFLRETsL |
| 1267 | TmLsPREKIFYY |
| 1268 | TMLsPREKIFYY |
| 1269 | TPAGSARGsPTRPNPP |
| 1270 | TPHtPKSLL |
| 1271 | TPIsPGRASGmTTL |
| 1272 | TPIsPGRASGMTTL |
| 1273 | tPPSSEKLVSVM |
| 1274 | TPQPsKDTLL |
| 1275 | TPsPARPAL |
| 1276 | TPVsPVKF |
| 1277 | TQRKFsLQF |
| 1278 | TRDsLLIHL |
| 1279 | TSEtPQPPR |
| 1280 | TSIsPALAR |
| 1281 | TSVGsPSNTIGR |
| 1282 | TSYNSISSVVsR |
| 1283 | TTEVIRKGsITEY |
| 1284 | tTGSPTEFL |
| 1285 | TtGSPTEFL |
| 1286 | TTGsPTEFL |
| 1287 | TVFsPDGHLF |
| 1288 | TVFSPtLPAA |
| 1289 | TVFsPTLPAAR |
| 1290 | TVFtPVEEK |
| 1291 | TVKQKYLsF |
| 1292 | TVNsPAIYK |
| 1293 | TVNsPAIYKF |
| 1294 | TVStPPPFQGR |
| 1295 | TVsTVGISI |
| 1296 | TVVsPRALEL |
| 1297 | TVYSsEEAELLK |
| 1298 | TYDDRAYSsF |
| 1299 | TYVsSFYHAF |
| 1300 | VAKRNsLKELW |
| 1301 | VARsPLKEF |
| 1302 | VEHsPFSSF |
| 1303 | VELsPARSw |
| 1304 | VELsPARSW |
| 1305 | VELsPLKGSVSW |
| 1306 | VETsFRKLSF |
| 1307 | VETSFRKLsF |
| 1308 | VIDsQELSK |
| 1309 | VIKsPSWQR |
| 1310 | VImsIRTKL |
| 1311 | VIMsIRTKL |
| 1312 | VLAsPLKTGR |
| 1313 | VLFSsPPQm |
| 1314 | VLGsQEALHPV |
| 1315 | VLPSQVYsL |
| 1316 | VmDsPVHL |
| 1317 | VmFRtPLASV |
| 1318 | VPFKRLsVVF |
| 1319 | VPKGPIHsPVEL |
| 1320 | VPKKPPPsP |
| 1321 | VPNEEDPsL |
| 1322 | VPRsPFKVKVL |
| 1323 | VPRsPVIKI |
| 1324 | VPRtPVGKF |
| 1325 | VPSsPLRKA |
| 1326 | VPTsPKGRLL |
| 1327 | VRKsRAWVL |
| 1328 | VRTPSVQsL |
| 1329 | VSFsPTDHSL |
| 1330 | VSSsPRELL |
| 1331 | VVSsPKLAPK |
| 1332 | VYIPmsPGAHHF |
| 1333 | VYIPMsPGAHHF |
| 1334 | VYLPTHtSL |
| 1335 | VYLPTHTsL |
| 1336 | VYLPTHtSLL |
| 1337 | VYLPTHTsLL |
| 1338 | VYTsVQAQY |
| 1339 | WEDRPStPTIL |
| 1340 | WEFGKRDsL |
| 1341 | WPRsPGRAFL |
| 1342 | WVIGsPEILR |
| 1343 | YAFsPKIGR |
| 1344 | yEKIHLDFL |
| 1345 | YEVEPYsPGL |
| 1346 | YHLsPRAFL |
| 1347 | YILDSsPEKL |
| 1348 | YLRsVGDGETV |
| 1349 | YLVsPITGEKI |
| 1350 | YPDPHsPFA |
| 1351 | YPFLDsPNKYSL |
| 1352 | YPSFRRSsL |
| 1353 | YPtPYPDEL |
| 1354 | YQLsPTKLPSIN |
| 1355 | YQRPFSPsAY |
| 1356 | YQYsDQGIDY |
| 1357 | YRLsPEPTPL |
| 1358 | YRPsYSYDY |
| 1359 | YRPsYSYDYEFD |
| 1360 | YRYDGQHFsL |
| 1361 | YRYsLEKAL |
| 1362 | YSLDsPGPEKmAL |
| 1363 | YSLDsPGPEKMAL |
| 1364 | YSLsPSKSYKY |
| 1365 | YSmsPGAMR |
| 1366 | YSMsPGAmR |
| 1367 | YSMsPGAMR |
| 1368 | YVKLTPVsL |
| 1369 | YVSsPDPQL |
| 1370 | YYFsPSGKKF |
| 1371 | yYISPRITF |
| 3921 | DIAsLVGHEF |
| 3922 | DIVsEYTHY |
| 3923 | DSADLPPPsAL |
| 3924 | DVIDsQELSKVSREF |
| 3925 | ETRSPsPISI |
| 3926 | FKmIRSQsL |
| 3927 | GAVsPGALR |
| 3928 | GLPsPRGPGL |
| 3929 | GRILsGVVTK |
| 3930 | GRMIRAEsGPDLRY |
| 3931 | GRmIRAEsGPDLRY |
| 3932 | HPDGtPPKL |
| 3933 | HPHLRKVsV |
| 3934 | HRRIDIsPSTL |
| 3935 | KAsSLISLL |
| 3936 | KASsLISLL |
| 3937 | KIPsAVSTVSM |
| 3938 | KRFsMVVQDGIVK |
| 3939 | KRFsmVVQDGIVK |
| 3940 | KRFStEEFVLL |
| 3941 | KRIsISTS |
| 3942 | KRIsISTSG |
| 3943 | KRIsISTSGG |
| 3944 | KRLsLDSSLVEY |
| 3945 | KRLsLPADIRL |
| 3946 | KRTsKYFSL |
| 3947 | LPRsSSMAAGL |
| 3948 | LPRSsSMAAGL |
| 3949 | LQHsFSFAGF |
| 3950 | LtSKLSTKD |
| 3951 | NPTMLRTHsL |
| 3952 | NRsSPVHII |
| 3953 | QVLPKtVKLF |
| 3954 | RLPSPtSPFSSL |
| 3955 | RPKLHHsLSF |
| 3956 | RPRsDSLIL |
| 3957 | RQPswDPSPV |
| 3958 | RRAsAPLPGL |
| 3959 | RRASLsEIG |
| 3960 | RRAsLSEIG |
| 3961 | RRFsADEQFF |
| 3962 | RRFsFSANFY |
| 3963 | RRFsPPSSSL |
| 3964 | RRIDIsPS |
| 3965 | RRIsIVENcF |
| 3966 | RRLPIFsRLSI |
| 3967 | RRLsAIFLRL |
| 3968 | RRLsFLVSYI |
| 3969 | RRLsFTLERL |
| 3970 | RRLsIEGNIAV |
| 3971 | RRLsPPTLL |
| 3972 | RSFSPtmKV |
| 3973 | RSsSFTFHI |
| 3974 | RSSsFTFHI |
| 3975 | RtAATEVSL |
| 3976 | RVDsTTCLF |
| 3977 | RVDsTTcLFP |
| 3978 | RVPsEHPYL |
| 3979 | SAITPSVSRTsF |
| 3980 | SEGsEPALLH |
| 3981 | SIAsPDVKLNL |
| 3982 | SIKsDVPVY |
| 3983 | SLALtPPQA |
| 3984 | SLKsRLR |
| 3985 | SLPsPHPVRY |
| 3986 | SPRPSPVPKPsPPL |
| 3987 | SRFsSGGA |
| 3988 | SRIVRTPsL |
| 3989 | SRTSFTSVsR |
| 3990 | TMPTsLPNL |
| 3991 | TRLsPIAPAPGF |
| 3992 | TSNsQKYmSF |
| 3993 | TSTSRYLsL |
| 3994 | VKTsGSSDRL |
| 3995 | NIKsPALAF |
| 3996 | LsPRAVSTTF |
| 4149 | AHDPSGMFRSQsF |
| 4150 | RVAsPAYSL |
| 4151 | RRWtLGGMVNR |
| 4152 | SIPSTLVsF |
| 4153 | RRGsYPFIDF |
| 4154 | LtLDQAYSY |
| 4155 | SPPsPVEREm |
| 4156 | SPPsPVEREM |
| 4157 | LYVLsALLI |
| 4158 | RPRsLSSPTV |
| 4159 | LPIFNRIsV |
| 4160 | IPRYHSQsPSm |
| 4161 | SPLVRRPsL |
| 4162 | EAPKVSRsL |
| 4163 | SLDSPsYVLY |
| 4164 | REYsPPYAP |
| 4165 | YGYEGSEsI |
| 4166 | RPSsLPLDF |
| 4167 | RPsSLPLDF |
| 4168 | TPItPLKDGF |
| 4169 | KRFsFKKSFKL |
| 4170 | KRNsRLGFLY |
| 4171 | RRAsAILPGVL |

‘s’, ‘t’, and ‘y’ stand for phosphoserine, phosphothreonine, and phosphotyrosine, respectively.
‘m’ stands for oxidized methionine.
‘w’ stands for oxidized tryptophan.
‘c’ stands for cysteinylated cysteine.

[0047] Accordingly, in certain embodiments, the instant disclosure provides an antigenic polypeptide comprising an MHC-binding peptide comprising an amino acid sequence selected from the group consisting of SEQ ID NOs: 98-1371, 3921-3996, and 4149-4171. In certain embodiments, the amino acid sequence of the MHC-binding peptide consists of an amino acid sequence selected from the group consisting of SEQ ID NOs: 98-1371, 3921-3996, and 4149-4171. In certain embodiments, the amino acid sequence of the antigenic polypeptide consists of an amino acid sequence selected from the group consisting of SEQ ID NOs: 98-1371, 3921-3996, and 4149-4171. In certain embodiments, the antigenic polypeptide consists of an amino acid sequence selected from the group consisting of SEQ ID NOs: 98-1371, 3921-3996, and 4149-4171.

[0048] In certain embodiments, the MHC-binding peptides disclosed herein are 8 to 50 amino acids, (e.g., 8, 9, 10, 11, 12, 13, 14, 15, 16, 17, 18, 19, 20, 21, 22, 23, 24, 25, 26, 27, 28, 29, 30, 31, 32, 33, 34, 35, 36, 37, 38, 39, 40, 41, 42, 43, 44, 45, 46, 47, 48, 49, or 50 amino acids) in length.

[0049] In certain embodiments, the antigenic peptides disclosed herein are 8 to 100 amino acids, (e.g., 8, 9, 10, 11, 12, 13, 14, 15, 16, 17, 18, 19, 20, 21, 22, 23, 24, 25, 26, 27, 28, 29, 30, 31, 32, 33, 34, 35, 36, 37, 38, 39, 40, 41, 42, 43, 44, 45, 46, 47, 48, 49, 50, 51, 52, 53, 54, 55, 56, 57, 58, 59, 60, 61, 62, 63, 64, 65, 66, 67, 68, 69, 70, 71, 72, 73, 74, 75, 76, 77, 78, 79, 80, 81, 82, 83, 84, 85, 86, 87, 88, 89, 90, 91, 92, 93, 94, 95, 96, 97, 98, 99, or 100 amino acids) in length. In certain embodiments, an antigenic peptide is 8 to 50 amino acids in length.

[0050] In certain embodiments, the antigenic peptides disclosed herein are less than 9, 10, 11, 12, 13, 14, 15, 16, 17, 18, 19, 20, 21, 22, 23, 24, 25, 26, 27, 28, 29, 30, 31, 32, 33, 34, 35, 36, 37, 38, 39, 40, 41, 42, 43, 44, 45, 46, 47, 48, 49, 50, 51, 52, 53, 54, 55, 56, 57, 58, 59, 60, 61, 62, 63, 64, 65, 66, 67, 68, 69, 70, 71, 72, 73, 74, 75, 76, 77, 78, 79, 80, 81, 82, 83, 84, 85, 86, 87, 88, 89, 90, 91, 92, 93, 94, 95, 96, 97, 98, 99, or 100 amino acids in length.

[0051] In certain embodiments, the amino acid sequence of the antigenic polypeptides disclosed herein does not comprise more than 8, 9, 10, 11, 12, 13, 14, 15, 16, 17, 18, 19, 20, 21, 22, 23, 24, 25, 26, 27, 28, 29, 30, 31, 32, 33, 34, 35, 36, 37, 38, 39, 40, 41, 42, 43, 44, 45, 46, 47, 48, 49, 50, 51, 52, 53, 54, 55, 56, 57, 58, 59, 60, 61, 62, 63, 64, 65, 66, 67, 68, 69, 70, 71, 72, 73, 74, 75, 76, 77, 78, 79, 80, 81, 82, 83, 84, 85, 86, 87, 88, 89, 90, 91, 92, 93, 94, 95, 96, 97, 98, 99, or 100 contiguous amino acids of a protein (e.g., a naturally occurring protein) that comprises an amino acid sequence selected from the group consisting of SEQ ID NO: 98-1371, 3921-3996, and 4149-4171.

[0052] In another aspect, the instant disclosure provides an antigenic polypeptide comprising a tumor-associated MHC-binding peptide and an HSP-binding peptide. Exemplary HSP-binding peptides are set forth in Table 2 herein. Exemplary antigenic polypeptides comprising HSP-binding peptides are set forth in Table 3 and Table 4 herein.

TABLE 2
Amino acid sequences of exemplary HSP-
binding peptides, linkers, and HSPs

| | | SEQ ID |
|---|---|---|
| Description | Amino Acid Sequence | NO |
| Consensus | X₁X₂X₃X₄X₅X₆X₇, wherein: | 1 |
| sequence 1 | X₁ is omitted, N, F, or Q; | |
| | X₂ is W, L, or F; | |
| | X₃ is L or I; | |
| | X₄ is R, L, or K; | |
| | X₅ is L, W, or I; | |
| | X₆ is T, L, F, K, R, or W; and | |
| | X₇ is W, G, K, or F | |
| Consensus | X₁LX₂LTX₃, wherein: | 2 |
| sequence 2 | X₁ is W or F; | |
| | X₂ is R or K; and | |
| | X₃ is W, F, or G | |
| Consensus | NX₁LX₂LTX₃, wherein: | 3 |
| sequence 3 | X₁ is W or F; | |
| | X₂ is R or K; and | |
| | X₃ is W, F, or G | |
| Consensus | WLX₁LTX₂, wherein: | 4 |
| sequence 4 | X₁ is R or K; and | |
| | X₂ is W or G | |
| Consensus | NWLX₁LTX₂, wherein: | 5 |
| sequence 5 | X₁ is R or K; and | |
| | X₂ is W or G | |
| Consensus | NWX₁X₂X₃X₄X₅, wherein: | 6 |
| sequence 6 | X₁ is L or I; | |
| | X₂ is L, R, or K; | |
| | X₃ is L or I; | |
| | X₄ is T, L, F, K, R, or W; and | |
| | X₅ is W or K | |
| HSP1 | NLLRLTG | 7 |
| HSP016 | WLRLTW | 8 |
| HSP017 | NWLRLTW | 9 |
| HSP018 | WLKLTW | 10 |
| HSP019 | NWLKLTW | 11 |
| HSP020 | WLRLTG | 12 |
| HSP021 | NWLRLTG | 13 |
| HSP022 | FLRLTF | 14 |
| HSP023 | NFLRLTF | 15 |
| HSP024 | WLRLTF | 16 |
| HSP025 | NWLRLTF | 17 |
| HSP040 | WLKLTF | 18 |
| HSP041 | NWLKLTF | 19 |
| HSP042 | WLKLTG | 20 |
| HSP043 | NWLKLTG | 21 |
| HSP044 | FLRLTW | 22 |
| HSP045 | NFLRLTW | 23 |
| HSP046 | FLRLTG | 24 |
| HSP047 | NFLRLTG | 25 |
| HSP048 | FLKLTW | 26 |
| HSP049 | NFLKLTW | 27 |
| HSP050 | FLKLTF | 28 |
| HSP051 | NFLKLTF | 29 |
| HSP103 | FLKLTG | 30 |
| HSP104 | NFLKLTG | 31 |
| HSP185 | NWLLLTW | 32 |
| HSP186 | NLLRWTG | 33 |
| HSP188 | FWLRLTW | 34 |
| HSP189 | NWLRLLW | 35 |
| HSP190 | NWLRLFW | 36 |
| HSP191 | NWLRLKW | 37 |
| HSP192 | NWIRITW | 38 |
| HSP193 | QWLRLTW | 39 |
| HSP194 | NWLKLKW | 40 |
| HSP195 | NWLKLRW | 41 |
| HSP196 | NWLKLWK | 42 |
| Linkerl | FFRK | 43 |
| Linker2 | FR | N/A |
| Consensus | FFRKX₁X₂X₃X₄X₅X₆X₇, wherein: | 44 |
| sequence 1 | X₁ is omitted, N, F, or Q; | |
| with N- | X₂ is W, L, or F; | |
| terminal | X₃ is L or I; | |
| linker | X₄ is R, L, or K; | |
| | X₅ is L, W, or I; | |
| | X₆ is T, L, F, K, R, or W; and | |
| | X₇ is W, G, K, or F | |
| Consensus | FFRKX₁LX₂LTX₃, wherein: | 45 |
| sequence 2 | X₁ is W or F; | |
| with N- | X₂ is R or K; and | |
| terminal | X₃ is W, F, or G | |
| linker | | |
| Consensus | FFRKNX₁LX₂LTX₃, wherein: | 46 |
| sequence 3 | X₁ is W or F; | |
| with N- | X₂ is R or K; and | |
| terminal | X₃ is W, F, or G | |
| linker | | |
| Consensus | FFRKWLX₁LTX₂, wherein: | 47 |
| sequence 4 | X₁ is R or K; and | |
| with N- | X₂ is W or G | |
| terminal | | |
| linker | | |
| Consensus | FFRKNWLX₁LTX₂, wherein: | 48 |
| sequence 5 | X₁ is R or K; and | |
| with N- | X₂ is W or G | |
| terminal | | |
| linker | | |
| Consensus | FFRKNWX₁X₂X₃X₄X₅, wherein: | 49 |
| sequence 6 | X₁ is L or I; | |
| with N- | X₂ is L, R, or K; | |
| terminal | X₃ is L or I; | |
| linker | X₄ is T, L, F, K, R, or W; and | |
| | X₅ is W or K | |
| Linker1- | FFRKNLLRLTG | 50 |
| HSP1 | | |
| Linker2- | FRNLLRLTG | 51 |
| HSP1 | | |
| HSP001 | FFRKNLLRLTG | 52 |
| HSP003 | FFRKNWLLLTW | 53 |
| HSP004 | FFRKNLLRWTG | 54 |
| HSP006 | FFRKNWLRLTW | 55 |
| HSP012 | FFRKNWLKLTW | 56 |
| HSP013 | FFRKNWIRITW | 57 |
| HSP014 | FFRKQWLRLTW | 58 |
| HSP026 | FFRKNWLRLTG | 59 |
| HSP027 | FFRKNFLRLTF | 60 |
| HSP028 | FRNWLRLTW | 61 |
| HSP029 | FRNWLKLTW | 62 |
| HSP030 | FRNWLRLTG | 63 |
| HSP031 | FRNFLRLTF | 64 |
| HSP055 | FFRKNWLKLKW | 65 |
| HSP057 | FFRKNWLKLRW | 66 |
| HSP058 | FFRKNWLKLWK | 67 |
| Consensus | X₁X₂X₃X₄X₅X₆X₇FFRK, wherein: | 68 |
| sequence 1 | X₁ is omitted, N, F, or Q; | |
| with C- | X₂ is W, L, or F; | |
| terminal | X₃ is L or I; | |
| linker | X₄ is R, L, or K; | |
| | X₅ is L, W, or I; | |
| | X₆ is T, L, F, K, R, or W; and | |
| | X₇ is W, G, K, or F | |
| Consensus | X₁LX₂LTX₃FFRK, wherein: | 69 |
| sequence 2 | X₁ is W or F; | |
| with C- | X₂ is R or K; and | |
| terminal | X₃ is W, F, or G | |
| linker | | |
| Consensus | NX₂LX₂LTX₃FFRK, wherein: | 70 |
| sequence 3 | X₁ is W or F; | |
| with C- | X₂ is R or K; and | |
| terminal | X₃ is W, F, or G | |
| linker | | |
| Consensus | WLX₂LTX₂FFRK, wherein: | 71 |
| sequence 4 | X₁ is R or K; and | |
| with C- | X₂ iS W or G | |
| terminal | | |
| linker | | |
| Consensus | NWLX₁LTX₂FFRK, wherein: | 72 |
| sequence 5 | X₁ is R or K; and | |
| with C- | X₂ iS W or G | |
| terminal | | |
| linker | | |
| Consensus | NWX₂X₂X₃X₄X₅FFRK, wherein: | 73 |
| sequence 6 | X₁ is L or I; | |
| with C- | X₂ is L, R, or K; | |
| terminal | X₃ is L or I; | |
| linker | X₄ is T, L, F, K, R, or W; and | |
| | X₅ is W or K | |
| HSP1- | NLLRLTGFFRK | 74 |
| Linker1 | | |
| HSP1- | NLLRLTGFR | 75 |
| Linker2 | | |
| HSP032 | NWLRLTWFFRK | 76 |
| HSP033 | NWLKLTWFFRK | 77 |
| HSP034 | NWLRLTGFFRK | 78 |
| HSP035 | NFLRLTFFFRK | 79 |
| HSP036 | NWLRLTWFR | 80 |
| HSP037 | NWLKLTWFR | 81 |
| HSP038 | NWLRLTGFR | 82 |
| HSP039 | NFLRLTFFR | 83 |
| HSP197 | NLLRLTWFFRK | 84 |
| HSP198 | NRLLLTGFFRK | 85 |
| HSP199 | NWLLLTWFFRK | 86 |
| HSP200 | NLLRWTGFFRK | 87 |
| HSP201 | NRLWLTGFFRK | 88 |
| HSP202 | FWLRLTWFFRK | 89 |
| HSP203 | NWLRLLWFFRK | 90 |
| HSP204 | NWLRLFWFFRK | 91 |
| HSP205 | NWLRLKWFFRK | 92 |
| HSP206 | NWIRITWFFRK | 93 |
| HSP207 | QWLRLTWFFRK | 94 |
| HSP208 | NWLKLKWFFRK | 95 |
| HSP209 | NWLKLRWFFRK | 96 |
| HSP210 | NWLKLWKFFRK | 97 |
| rh-Hsc70 | SKGPAVGIDLGTTYSCVGVFQHGKVEIIANDQGNRTTPSYVAFT | 3920 |
| | DTERLIGDAAKNQVAMNPTNTVFDAKRLIGRRFDDAVVQSDMKH | |
| | WPFMVVNDAGRPKVQVEYKGETKSFYPEEVSSMVLTKMKEIAEA | |
| | YLGKTVTNAVVTVPAYFNDSQRQATKDAGTIAGLNVLRIINEPT | |
| | AAAIAYGLDKKVGAERNVLIFDLGGGTFDVSILTIEDGIFEVKS | |
| | TAGDTHLGGEDFDNRMVNHFIAEFKRKHKKDISENKRAVRRLRT | |
| | ACERAKRTLSSSTQASIEIDSLYEGIDFYTSITRARFEELNADL | |
| | FRGTLDPVEKALRDAKLDKSQIHDIVLVGGSTRIPKIQKLLQDF | |
| | FNGKELNKSINPDEAVAYGAAVQAAILSGDKSENVQDLLLLDVT | |
| | PLSLGIETAGGVMTVLIKRNTTIPTKQTQTFTTYSDNQPGVLIQ | |
| | VYEGERAMTKDNNLLGKFELTGIPPAPRGVPQIEVTFDIDANGI | |
| | LNVSAVDKSTGKENKITITNDKGRLSKEDIERMVQEAEKYKAED | |
| | EKQRDKVSSKNSLESYAFNMKATVEDEKLQGKINDEDKQKILDK | |
| | CNEIINWLDKNQTAEKEEFEHQQKELEKVCNPIITKLYQSAGGM | |
| | PGGMPGGFPGGGAPPSGGASSGPTIEEVD | |

TABLE 3
Amino acid sequences of exemplary
antigenic polypeptides

| SEQ | |
|---|---|
| ID | |
| NO | Amino Acid Sequence |
| 1372 | AELGRLsPRAYFFRKNLLRLTG |
| 1373 | AESImsFHIFFRKNLLRLTG |
| 1374 | AESIMsFHIFFRKNLLRLTG |
| 1375 | AEsLKSLSSELFFRKNLLRLTG |
| 1376 | AEtPDIKLFFFRKNLLRLTG |
| 1377 | AGFsFVNPKFFRKNLLRLTG |
| 1378 | AHDPSGmFRSQsFFFRKNLLRLTG |
| 1379 | ALDSGAsLLHLFFRKNLLRLTG |
| 1380 | ALmGsPQLVAAFFRKNLLRLTG |
| 1381 | ALPPGSYAsLFFRKNLLRLTG |
| 1382 | ALPTPALsPSLMFFRKNLLRLTG |
| 1383 | ALSsSFLVLFFRKNLLRLTG |
| 1384 | ALSSsFLVLFFRKNLLRLTG |
| 1385 | ALStPVVEKFFRKNLLRLTG |
| 1386 | ALVDGyFRLFFRKNLLRLTG |
| 1387 | ALwsPGLAKFFRKNLLRLTG |
| 1388 | AmLGSKsPDPYRLFFRKNLLRLTG |
| 1389 | APAsPFRQLFFRKNLLRLTG |
| 1390 | APAsPLRPLFFRKNLLRLTG |
| 1391 | APAsPNHAGVLFFRKNLLRLTG |
| 1392 | APFHLtPTLYFFRKNLLRLTG |
| 1393 | APKsPSSEWLFFRKNLLRLTG |
| 1394 | APRtPPGVTFFFRKNLLRLTG |
| 1395 | APsSPDVKLFFRKNLLRLTG |
| 1396 | APSsPDVKLFFRKNLLRLTG |
| 1397 | APTsPLGHLFFRKNLLRLTG |
| 1398 | APVsPRPGLFFRKNLLRLTG |
| 1399 | ARFsGFYSmFFRKNLLRLTG |
| 1400 | ARFsGFYSMFFRKNLLRLTG |
| 1401 | ARFsPKVSLFFRKNLLRLTG |
| 1402 | ARGIsPIVFFFRKNLLRLTG |
| 1403 | ARYsGSYNDYFFRKNLLRLTG |
| 1404 | ASFKAELsYFFRKNLLRLTG |
| 1405 | ASFtPTSILKFFRKNLLRLTG |
| 1406 | ASFtPTSILKRFFRKNLLRLTG |
| 1407 | ASLsPSVSKFFRKNLLRLTG |
| 1408 | ATIsPPLQPKFFRKNLLRLTG |
| 1409 | AVILPPLsPYFKFFRKNLLRLTG |
| 1410 | AVLEyLKIFFRKNLLRLTG |
| 1411 | AVNQFsPSLARFFRKNLLRLTG |
| 1412 | AVRNFsPTDYYFFRKNLLRLTG |
| 1413 | AVRNFSPtDYYFFRKNLLRLTG |
| 1414 | AWRRLsRDSGGYFFRKNLLRLTG |
| 1415 | AYGGLtSPGLSYFFRKNLLRLTG |
| 1416 | AYGGLTsPGLSYFFRKNLLRLTG |
| 1417 | AYSsYVHQYFFRKNLLRLTG |
| 1418 | CtFGSRQIFFRKNLLRLTG |
| 1419 | DFAsPFHERFFRKNLLRLTG |
| 1420 | DFHsPIVLGRFFRKNLLRLTG |
| 1421 | DIAsPTFRRLFFRKNLLRLTG |
| 1422 | DIIRQPsEEEIIKFFRKNLLRLTG |
| 1423 | DIKsVFEAFFFRKNLLRLTG |
| 1424 | DILsPRLIRFFRKNLLRLTG |
| 1425 | DIRRFsLTTLRFFRKNLLRLTG |
| 1426 | DIsPPIFRRFFRKNLLRLTG |
| 1427 | DLtLKKEKFFFRKNLLRLTG |
| 1428 | DMLGLtKPAMPMFFRKNLLRLTG |
| 1429 | DNFsPDLRVLRFFRKNLLRLTG |
| 1430 | DPFGRPTsFFFRKNLLRLTG |
| 1431 | DPLIRWDsYFFRKNLLRLTG |
| 1432 | DPSLDLHsLFFRKNLLRLTG |
| 1433 | DSDPmLsPRFYFFRKNLLRLTG |
| 1434 | DSDPMLsPRFYFFRKNLLRLTG |
| 1435 | DSDPmLsPRFYAYFFRKNLLRLTG |
| 1436 | DSDPMLsPRFYAYFFRKNLLRLTG |
| 1437 | DsGEGDFLAEGGGVRFFRKNLLRLTG |
| 1438 | DSKsPLGFYFFRKNLLRLTG |
| 1439 | DTIsLASERYFFRKNLLRLTG |
| 1440 | DTIsPTLGFFFRKNLLRLTG |
| 1441 | DTQSGsLLFIGRFFRKNLLRLTG |
| 1442 | DTsSLPTVIMRFFRKNLLRLTG |
| 1443 | DTSsLPTVImRFFRKNLLRLTG |
| 1444 | DTSsLPTVIMRFFRKNLLRLTG |
| 1445 | DTTsLRTLRIFFRKNLLRLTG |
| 1446 | DVAsPDGLGRLFFRKNLLRLTG |
| 1447 | DVAsPTLRFFRKNLLRLTG |
| 1448 | DVAsPTLRRFFRKNLLRLTG |
| 1449 | DVAsPTLRRLFFRKNLLRLTG |
| 1450 | DVIDsQELSKVFFRKNLLRLTG |
| 1451 | DVYSGtPTKVFFRKNLLRLTG |
| 1452 | DYSPYFKtIFFRKNLLRLTG |
| 1453 | EAsSPVPYLFFRKNLLRLTG |
| 1454 | EASsPVPYLFFRKNLLRLTG |
| 1455 | EEAPQtPVAFFFRKNLLRLTG |
| 1456 | EEDtYEKVFFFRKNLLRLTG |
| 1457 | EEFsPRQAQmFFFRKNLLRLTG |
| 1458 | EEFsPRQAQMFFFRKNLLRLTG |
| 1459 | EEIsPTKFPGLFFRKNLLRLTG |
| 1460 | EEIsPTKFPGLYFFRKNLLRLTG |
| 1461 | EELsPLALGRFFFRKNLLRLTG |
| 1462 | EELsPSTVLYFFRKNLLRLTG |
| 1463 | EELSPsTVLYFFRKNLLRLTG |
| 1464 | EELSPtAKFFFRKNLLRLTG |
| 1465 | EGPEtGYSLFFRKNLLRLTG |
| 1466 | EHERSIsPLLFFFRKNLLRLTG |
| 1467 | EIVNFsPIARFFRKNLLRLTG |
| 1468 | ERLKIRGsLFFRKNLLRLTG |
| 1469 | ERVDSLVsLFFRKNLLRLTG |
| 1470 | ESFSDyPPLGRFAFFRKNLLRLTG |
| 1471 | ESLsPIGDmKVFFRKNLLRLTG |
| 1472 | ESLsPIGDMKVFFRKNLLRLTG |
| 1473 | ESVYKASLsLFFRKNLLRLTG |
| 1474 | ETRRPsYLEWFFRKNLLRLTG |
| 1475 | EVIRKGsITEYFFRKNLLRLTG |
| 1476 | EVIsQHLVSYFFRKNLLRLTG |
| 1477 | EVIsVLQKYFFRKNLLRLTG |
| 1478 | EVLERKIsMFFRKNLLRLTG |
| 1479 | FAFPGStNSLFFRKNLLRLTG |
| 1480 | FAFPGSTNsLFFRKNLLRLTG |
| 1481 | FASPtSPPVLFFRKNLLRLTG |
| 1482 | FASPTsPPVLFFRKNLLRLTG |
| 1483 | FATIKSAsLFFRKNLLRLTG |
| 1484 | FATIRTAsLFFRKNLLRLTG |
| 1485 | FAVsPIPGRGGVLFFRKNLLRLTG |
| 1486 | FAwsPLAGEKFFFRKNLLRLTG |
| 1487 | FAWsPLAGEKFFFRKNLLRLTG |
| 1488 | FAYsPGGAHGmLFFRKNLLRLTG |
| 1489 | FFFtARTSFFFRKNLLRLTG |
| 1490 | FGGQRLtLFFRKNLLRLTG |
| 1491 | FHGISTVsLFFRKNLLRLTG |
| 1492 | FHVtPLKLFFRKNLLRLTG |
| 1493 | FIVsPVPESRLFFRKNLLRLTG |
| 1494 | FKVsPLTFGRFFRKNLLRLTG |
| 1495 | FLDsAYFRLFFRKNLLRLTG |
| 1496 | FLDsGTIRGVFFRKNLLRLTG |
| 1497 | FLFsPPEVTGRFFRKNLLRLTG |
| 1498 | FLKPsTSGDSLFFRKNLLRLTG |
| 1499 | FLKPSTsGDSLFFRKNLLRLTG |
| 1500 | FLKPSTSGDsLFFRKNLLRLTG |
| 1501 | FLNEKARLsYFFRKNLLRLTG |
| 1502 | FLsRSIPSLFFRKNLLRLTG |
| 1503 | FPDNsDVSSIGRLFFRKNLLRLTG |
| 1504 | FPDNSDVSsIGRLFFRKNLLRLTG |
| 1505 | FPLMRSKsLFFRKNLLRLTG |
| 1506 | FPLsPTKLSQYFFRKNLLRLTG |
| 1507 | FPSMPsPRLFFRKNLLRLTG |
| 1508 | FQYSKSPsLFFRKNLLRLTG |
| 1509 | FRFsPMGVDHMFFRKNLLRLTG |
| 1510 | FRPPPLtPEDVGFFFRKNLLRLTG |
| 1511 | FRRPDIQYPDAtDEFFRKNLLRLTG |
| 1512 | FRRsDDMFTFFFRKNLLRLTG |
| 1513 | FRYSGKtEYFFRKNLLRLTG |
| 1514 | FSFKKsFKLFFRKNLLRLTG |
| 1515 | FSFsPGAGAFRFFRKNLLRLTG |
| 1516 | FSLRYsPGmDAYFFRKNLLRLTG |
| 1517 | FSLRYsPGMDAYFFRKNLLRLTG |
| 1518 | FSRPSMsPTPLDRFFRKNLLRLTG |
| 1519 | FSVDsPRIYFFRKNLLRLTG |
| 1520 | FTIFRTIsVFFRKNLLRLTG |
| 1521 | FtPPVVKRFFRKNLLRLTG |
| 1522 | FVLsPIKEPAFFRKNLLRLTG |
| 1523 | FVRsPGTGAFFFRKNLLRLTG |
| 1524 | FVtTPTAELFFRKNLLRLTG |
| 1525 | FVTtPTAELFFRKNLLRLTG |
| 1526 | FVTTPtAELFFRKNLLRLTG |
| 1527 | FYYsPSGKKFFFRKNLLRLTG |
| 1528 | GALsRYLFRFFRKNLLRLTG |
| 1529 | GEDPLsPRALFFRKNLLRLTG |
| 1530 | GELEsIGELFFFRKNLLRLTG |
| 1531 | GEmsPQRFFFFRKNLLRLTG |
| 1532 | GEMsPQRFFFFRKNLLRLTG |
| 1533 | GEmsPQRFFFFFRKNLLRLTG |
| 1534 | GENKsPLLLFFRKNLLRLTG |
| 1535 | GEPRAPtPPSGTEVTLFFRKNLLRLT |
| | G |
| 1536 | GEPsPPHDILFFRKNLLRLTG |
| 1537 | GEtSPRTKITWFFRKNLLRLTG |
| 1538 | GETsPRTKITWFFRKNLLRLTG |
| 1539 | GEwsASLPHRFFFRKNLLRLTG |
| 1540 | GEwSAsLPHRFFFRKNLLRLTG |
| 1541 | GEWsASLPHRFFFRKNLLRLTG |
| 1542 | GEYsPGTALPFFRKNLLRLTG |
| 1543 | GGLTsPGLSYFFRKNLLRLTG |
| 1544 | GGSISVQVNSIKFDsEFFRKNLLRLT |
| | G |
| 1545 | GHGsPFPSLFFRKNLLRLTG |
| 1546 | GIFPGtPLKKFFRKNLLRLTG |
| 1547 | GIISsPLTGKFFRKNLLRLTG |
| 1548 | GIISSPLtGKFFRKNLLRLTG |
| 1549 | GImsPLAKKFFRKNLLRLTG |
| 1550 | GLFsPIRSSAFFFRKNLLRLTG |
| 1551 | GLLsLSALGSQAHLFFRKNLLRLTG |
| 1552 | GLPGGGsPTTFLFFRKNLLRLTG |
| 1553 | GLSsLSIHLFFRKNLLRLTG |
| 1554 | GLTsPGLSYSLFFRKNLLRLTG |
| 1555 | GLtVSIPGLFFRKNLLRLTG |
| 1556 | GMAILsLLLKFFRKNLLRLTG |
| 1557 | GPGHHHKPGLGEGtPFFRKNLLRLTG |
| 1558 | GPLSRVKsLFFRKNLLRLTG |
| 1559 | GPLVRQIsLFFRKNLLRLTG |
| 1560 | GPRAPSPtKPLFFRKNLLRLTG |
| 1561 | GPRsASLLFFRKNLLRLTG |
| 1562 | GPRSFtPLSIFFRKNLLRLTG |
| 1563 | GPRsPKAWLFFRKNLLRLTG |
| 1564 | GPRtPTQPLLFFRKNLLRLTG |
| 1565 | GRNsLSSLPTYFFRKNLLRLTG |
| 1566 | GRQSPsFKLFFRKNLLRLTG |
| 1567 | GSFAsPGRLFFFRKNLLRLTG |
| 1568 | GsFRGFPALFFRKNLLRLTG |
| 1569 | GSKsPDPYRLFFRKNLLRLTG |
| 1570 | GSRsLYNLRFFRKNLLRLTG |
| 1571 | GTFPKALsIFFRKNLLRLTG |
| 1572 | GtPLSQAIIHQYFFRKNLLRLTG |
| 1573 | GTVtPPPRLVKFFRKNLLRLTG |
| 1574 | GTYVPSsPTRLAYFFRKNLLRLTG |
| 1575 | GVIKsPSWQRFFRKNLLRLTG |
| 1576 | GVIsPQELLKFFRKNLLRLTG |
| 1577 | GVIsPQELLKKFFRKNLLRLTG |
| 1578 | GVLsPDTISSKFFRKNLLRLTG |
| 1579 | GVmtPLIKRFFRKNLLRLTG |
| 1580 | GVMtPLIKRFFRKNLLRLIG |
| 1581 | HEFsSPSHLLFFRKNLLRLTG |
| 1582 | HEFSsPSHLLFFRKNLLRLTG |
| 1583 | HELsDITELFFRKNLLRLTG |
| 1584 | HERSIsPLLFFRKNLLRLTG |
| 1585 | HFDsPPHLLFFRKNLLRLTG |
| 1586 | HHHKPGLGEGtPFFRKNLLRLTG |
| 1587 | HHPGLGEGtPFFRKNLLRLTG |
| 1588 | HKIsDYFEYFFRKNLLRLTG |
| 1589 | HLLEtTPKSEFFRKNLLRLTG |
| 1590 | HLLETtPKSEFFRKNLLRLTG |
| 1591 | HLLSPtKGIFFRKNLLRLTG |
| 1592 | HLNsLDVQLFFRKNLLRLTG |
| 1593 | HLPsPPLTQEVFFRKNLLRLTG |
| 1594 | HLSsFTMKLFFRKNLLRLTG |
| 1595 | HPIsPYEHLFFRKNLLRLTG |
| 1596 | HPIsPYEHLLFFRKNLLRLTG |
| 1597 | HPIsSEELLFFRKNLLRLTG |
| 1598 | HPISsEELLFFRKNLLRLTG |
| 1599 | HPIsSEELLSLKYFFRKNLLRLTG |
| 1600 | HPISsEELLSLKYFFRKNLLRLTG |
| 1601 | HPRPVPDsPVSVTRLFFRKNLLRLTG |
| 1602 | HPRsPNVLSVALFFRKNLLRLTG |
| 1603 | HPsLSAPALFFRKNLLRLTG |
| 1604 | HPSLsAPALFFRKNLLRLTG |
| 1605 | HPTLQAPsLFFRKNLLRLTG |
| 1606 | HPYRNsDPVIFFRKNLLRLTG |
| 1607 | HQFsLKENwFFRKNLLRLTG |
| 1608 | HQGKFLQtFFFRKNLLRLTG |
| 1609 | HRAsKVLFLFFRKNLLRLTG |
| 1610 | HRDsFSRmSLFFRKNLLRLTG |
| 1611 | HRDsFSRMSLFFRKNLLRLTG |
| 1612 | HRNsmKVFLFFRKNLLRLTG |
| 1613 | HRVsVILKLFFRKNLLRLTG |
| 1614 | HSDKRRPPsAELYFFRKNLLRLTG |
| 1615 | HSLsLDDIRLYFFRKNLLRLTG |
| 1616 | HSVsPDPVLFFRKNLLRLTG |
| 1617 | HTIsPLDLAFFRKNLLRLTG |
| 1618 | HTIsPLDLAKFFRKNLLRLTG |
| 1619 | HTIsPLDLAKLFFRKNLLRLTG |
| 1620 | HTIsPSFQLFFRKNLLRLTG |
| 1621 | HTISPsFQLFFRKNLLRLTG |
| 1622 | HVSLITPtKRFFRKNLLRLTG |
| 1623 | HYFsPFRPYFFRKNLLRLTG |
| 1624 | HYsSRLGSAIFFFRKNLLRLTG |
| 1625 | HYSsRLGSAIFFFRKNLLRLTG |
| 1626 | HYSSRLGsAIFFFRKNLLRLTG |
| 1627 | IAATKsLSVFFRKNLLRLTG |
| 1628 | IEIERILsVFFRKNLLRLTG |
| 1629 | IFDLQKTsLFFRKNLLRLTG |
| 1630 | IIQsPSSTGLLKFFRKNLLRLTG |
| 1631 | ILGPPPPsFHLFFRKNLLRLTG |
| 1632 | ILLtDLIIFFRKNLLRLTG |
| 1633 | IMKNLQAHyEFFRKNLLRLTG |
| 1634 | IPHQRSsLFFRKNLLRLTG |
| 1635 | IPKsKFLALFFRKNLLRLTG |
| 1636 | IPMtPTSSFFFRKNLLRLTG |
| 1637 | IPMTPtSSFFFRKNLLRLTG |
| 1638 | IPRPLsLIGFFRKNLLRLTG |
| 1639 | IPRsFRHLSFFFRKNLLRLTG |
| 1640 | IPsmSHVHLFFRKNLLRLTG |
| 1641 | IPsMSHVHLFFRKNLLRLTG |
| 1642 | IPsPLQPEmFFRKNLLRLTG |
| 1643 | IPsPLQPEMFFRKNLLRLTG |
| 1644 | IPVSKPLsLFFRKNLLRLTG |
| 1645 | IPVsRDWELFFRKNLLRLTG |
| 1646 | IRFGRKPsLFFRKNLLRLTG |
| 1647 | IRPsVLGPLFFRKNLLRLTG |
| 1648 | IRRsYFEVFFFRKNLLRLTG |
| 1649 | IRYSGHsLFFRKNLLRLTG |
| 1650 | ISKKLsFLSWFFRKNLLRLTG |
| 1651 | ISLDKLVsIFFRKNLLRLTG |
| 1652 | IsSLTTLSIFFRKNLLRLTG |
| 1653 | ISsLTTLSIFFRKNLLRLTG |
| 1654 | ISsSmHSLYFFRKNLLRLIG |
| 1655 | ISsSMHSLYFFRKNLLRLTG |
| 1656 | ISSsmHSLYFFRKNLLRLTG |
| 1657 | ITItPPEKYFFRKNLLRLTG |
| 1658 | ITLLsPKHKYFFRKNLLRLTG |
| 1659 | ItPPSSEKLVSVmFFRKNLLRLTG |
| 1660 | ItPPSSEKLVSVMFFRKNLLRLTG |
| 1661 | ITTsPITVRFFRKNLLRLTG |
| 1662 | ITTsPITVRKFFRKNLLRLTG |
| 1663 | ITYsPKLERFFRKNLLRLTG |
| 1664 | IVLPLsLQRFFRKNLLRLTG |
| 1665 | IVsSLRLAYFFRKNLLRLTG |
| 1666 | IVSsLRLAYFFRKNLLRLTG |
| 1667 | IYDsVKVYFFFRKNLLRLTG |
| 1668 | IYRSQsPHYFFFRKNLLRLTG |
| 1669 | KAFsESGSNLHALFFRKNLLRLTG |
| 1670 | KAFsPVRSVRFFRKNLLRLTG |
| 1671 | KAFsPVRSVRKFFRKNLLRLTG |
| 1672 | KAItPPQQPYFFRKNLLRLTG |
| 1673 | KASsPGHPAFFFRKNLLRLTG |
| 1674 | KAVsFHLVHFFRKNLLRLTG |
| 1675 | KAVsLFLFFRKNLLRLTG |
| 1676 | KAYtPVVVTQWFFRKNLLRLTG |
| 1677 | KEDsFLQRYFFRKNLLRLTG |
| 1678 | KEmSPtRQLFFRKNLLRLTG |
| 1679 | KEsEVFYELFFRKNLLRLTG |
| 1680 | KEsTLHLVLFFRKNLLRLTG |
| 1681 | KEStLHLVLFFRKNLLRLTG |
| 1682 | KFLsPAQYLYFFRKNLLRLTG |
| 1683 | KFRDLsPPRYFFRKNLLRLTG |
| 1684 | KFsLRAAEFFFRKNLLRLTG |
| 1685 | KGFsGTFQLFFRKNLLRLTG |
| 1686 | KIFERATsFFFRKNLLRLTG |
| 1687 | KIFsKQQGKAFQRFFRKNLLRLTG |
| 1688 | KIIsIFSGFFRKNLLRLTG |
| 1689 | KIIsIFSGTEKFFRKNLLRLTG |
| 1690 | KIKsLEEIYLFFRKNLLRLTG |
| 1691 | KINsLAHLRFFRKNLLRLTG |
| 1692 | KISsFTSLKFFRKNLLRLTG |
| 1693 | KISSFtSLKFFRKNLLRLTG |
| 1694 | KISSFTsLKFFRKNLLRLTG |
| 1695 | KISsLEIKLFFRKNLLRLTG |
| 1696 | KKLsLLNGGLFFRKNLLRLTG |
| 1697 | KLEGPDVsLFFRKNLLRLTG |
| 1698 | KLFHGsLEELFFRKNLLRLTG |
| 1699 | KLFPGsPAIYFFRKNLLRLTG |
| 1700 | KLHsLIGLGIFFRKNLLRLTG |
| 1701 | KLIDIVSsQKVFFRKNLLRLTG |
| 1702 | KLKsFTYEYFFRKNLLRLTG |
| 1703 | KLLDFGsLSNLFFRKNLLRLTG |
| 1704 | KLLEGEESRIsLFFRKNLLRLTG |
| 1705 | KLLsPILARYFFRKNLLRLTG |
| 1706 | KLLsTALHVFFRKNLLRLTG |
| 1707 | KLLsYIQRLFFRKNLLRLTG |
| 1708 | KLMsDVEDVSLFFRKNLLRLTG |
| 1709 | KLMsLGDIRLFFRKNLLRLTG |
| 1710 | KLmsPKADVKLFFRKNLLRLTG |
| 1711 | KLMsPVLKQHLFFRKNLLRLTG |
| 1712 | KLQEFsKEEFFRKNLLRLTG |
| 1713 | KLRIQtDGDKYFFRKNLLRLTG |
| 1714 | KLSsGLLPKLFFRKNLLRLTG |
| 1715 | KLwtLVSEQTRVFFRKNLLRLTG |
| 1716 | KLWtLVSEQTRVFFRKNLLRLTG |
| 1717 | KLYRPGsVAYFFRKNLLRLTG |
| 1718 | KLYsISSQVFFRKNLLRLTG |
| 1719 | KLYsPTSKALFFRKNLLRLTG |
| 1720 | KLYSPtSKALFFRKNLLRLTG |
| 1721 | KLYTyIQSRFFRKNLLRLTG |
| 1722 | KLYTyIQSRFFFRKNLLRLTG |
| 1723 | KmDsFLDMQLFFRKNLLRLTG |
| 1724 | KMDsFLDmQLFFRKNLLRLTG |
| 1725 | KmsSYAFFVFFRKNLLRLTG |
| 1726 | KmSsYAFFVFFRKNLLRLTG |
| 1727 | KMsSYAFFVFFRKNLLRLTG |
| 1728 | KMSsYAFFVFFRKNLLRLTG |
| 1729 | KmsSYAFFVQTFFRKNLLRLTG |
| 1730 | KmSsYAFFVQTFFRKNLLRLTG |
| 1731 | KMsSYAFFVQTFFRKNLLRLTG |
| 1732 | KMSsYAFFVQTFFRKNLLRLTG |
| 1733 | KPAsPARRLDLFFRKNLLRLTG |
| 1734 | KPDKTLRFsLFFRKNLLRLTG |
| 1735 | KPHsPVTGLYLFFRKNLLRLTG |
| 1736 | KPLsRVTSLFFRKNLLRLTG |
| 1737 | KPPsPGTVLFFRKNLLRLTG |
| 1738 | KPPSPGtVLFFRKNLLRLTG |
| 1739 | KPRPLsmDLFFRKNLLRLTG |
| 1740 | KPRSIsFPSAFFRKNLLRLTG |
| 1741 | KPSSLRRVtIFFRKNLLRLTG |
| 1742 | KPSsPRGSLLLFFRKNLLRLTG |
| 1743 | KQKsLTNLSFFFRKNLLRLTG |
| 1744 | KQKSLtNLSFFFRKNLLRLTG |
| 1745 | KRAsALLNLFFRKNLLRLTG |
| 1746 | KRAsYELEFFFRKNLLRLTG |
| 1747 | KRDsFIGTPYFFRKNLLRLTG |
| 1748 | KRFsLDFNLFFRKNLLRLTG |
| 1749 | KRIsIFLSMFFRKNLLRLTG |
| 1750 | KRIsISTSGGSFFFRKNLLRLTG |
| 1751 | KRLGsLVDEFFFRKNLLRLTG |
| 1752 | KRLsVELTSSLFFRKNLLRLTG |
| 1753 | KRLsVELTSSLFFFRKNLLRLTG |
| 1754 | KRLsVERIYQKFFRKNLLRLTG |
| 1755 | KRMsFVMEYFFRKNLLRLTG |
| 1756 | KRNsDLLLLFFRKNLLRLTG |
| 1757 | KRPsSEDFVFFFRKNLLRLTG |
| 1758 | KRPsSEDFVFLFFRKNLLRLTG |
| 1759 | KRPSsEDFVFLFFRKNLLRLTG |
| 1760 | KRRtGALVLFFRKNLLRLTG |
| 1761 | KRSsISQLLFFRKNLLRLTG |
| 1762 | KRVsTFQEFFFRKNLLRLTG |
| 1763 | KRVtWIVEFFFRKNLLRLTG |
| 1764 | KRYLFRsFFFRKNLLRLTG |
| 1765 | KRYsRSLTIFFRKNLLRLTG |
| 1766 | KSAsFAFEFFFRKNLLRLTG |
| 1767 | KSDGsFIGYFFRKNLLRLTG |
| 1768 | KSFsAPATQAYFFRKNLLRLTG |
| 1769 | KSGELLAtwFFRKNLLRLTG |
| 1770 | KSGEPLStWFFRKNLLRLTG |
| 1771 | KSKsIEITFFFRKNLLRLTG |
| 1772 | KsLPSDQVmLFFRKNLLRLTG |
| 1773 | KsLPSDQVMLFFRKNLLRLTG |
| 1774 | KSLsIEIGHEVFFRKNLLRLTG |
| 1775 | KSLSPsLLGYFFRKNLLRLTG |
| 1776 | KSSEEKRLSIsKFFFRKNLLRLTG |
| 1777 | KSSsLPRAFFFRKNLLRLTG |
| 1778 | KSVtPTKEFLFFRKNLLRLTG |
| 1779 | KTDsDSDLQLYFFRKNLLRLTG |
| 1780 | KTIsESDLNHSFFFRKNLLRLTG |
| 1781 | KTIsPKSTVYFFRKNLLRLTG |
| 1782 | KTKsMFFFLFFRKNLLRLTG |
| 1783 | KTLsLVKELFFRKNLLRLTG |
| 1784 | KTmsGTFLLFFRKNLLRLTG |
| 1785 | KTmSGtFLLFFRKNLLRLTG |
| 1786 | KTMSGtFLLFFRKNLLRLTG |
| 1787 | KTmsGTFLLRFFFRKNLLRLTG |
| 1788 | KTMsGTFLLRFFFRKNLLRLTG |
| 1789 | KtMSPSQMIMFFRKNLLRLTG |
| 1790 | KTQRVsLLFFFRKNLLRLTG |
| 1791 | KtRSLSVEIVYFFRKNLLRLTG |
| 1792 | KTRsLSVEIVYFFRKNLLRLTG |
| 1793 | KTVsPPIRKGWFFRKNLLRLTG |
| 1794 | KTVsSTKLVSFFFRKNLLRLTG |
| 1795 | KVDGPRSPsYFFRKNLLRLTG |
| 1796 | KVEsPPLEEwFFRKNLLRLTG |
| 1797 | KVFsLPTQLFFRKNLLRLTG |
| 1798 | KVFsPVIRSSFFFRKNLLRLTG |
| 1799 | KVGsFKFIYVFFRKNLLRLTG |
| 1800 | KVLswPFLmFFRKNLLRLTG |
| 1801 | KVLswPFLMFFRKNLLRLTG |
| 1802 | KWPsKRRIPVFFRKNLLRLTG |
| 1803 | KYRsVISDIFFFRKNLLRLTG |
| 1804 | LAFPsPEKLLRFFRKNLLRLTG |
| 1805 | LAsDRCSIHLFFRKNLLRLTG |
| 1806 | LEIKEsILSLFFRKNLLRLTG |
| 1807 | LEIsPDNSLFFRKNLLRLTG |
| 1808 | LEIsVGKSVFFRKNLLRLTG |
| 1809 | LEsPTTPLLFFRKNLLRLTG |
| 1810 | LESPtTPLLFFRKNLLRLTG |
| 1811 | LESPTtPLLFFRKNLLRLTG |
| 1812 | LGFEVKsKmVFFRKNLLRLTG |
| 1813 | LGFEVKsKMVFFRKNLLRLTG |
| 1814 | LGmEVLsGVFFRKNLLRLTG |
| 1815 | LGMEVLsGVFFRKNLLRLTG |
| 1816 | LIPDHtIRAFFRKNLLRLTG |
| 1817 | LLDIIRsLFFRKNLLRLTG |
| 1818 | LLDPRSYHtYFFRKNLLRLTG |
| 1819 | LLsPKHKYFFRKNLLRLTG |
| 1820 | LPAsPRARLSAFFRKNLLRLTG |
| 1821 | LPAsPSVSLFFRKNLLRLTG |
| 1822 | LPASPsVSLFFRKNLLRLTG |
| 1823 | LPDPGsPRLFFRKNLLRLTG |
| 1824 | LPEsPRLTLFFRKNLLRLTG |
| 1825 | LPFSGPREPsLFFRKNLLRLTG |
| 1826 | LPFSsSPSRSAFFRKNLLRLTG |
| 1827 | LPFSSsPSRSAFFRKNLLRLTG |
| 1828 | LPLsSSHLNVYFFRKNLLRLTG |
| 1829 | LPLSsSHLNVYFFRKNLLRLTG |
| 1830 | LPLSSsHLNVYFFRKNLLRLTG |
| 1831 | LPPVsPLKAAFFRKNLLRLTG |
| 1832 | LPRGLsPARQLFFRKNLLRLTG |
| 1833 | LPRGSSPsVLFFRKNLLRLTG |
| 1834 | LPRPLsPTKLFFRKNLLRLTG |
| 1835 | LPRPLSPtKLFFRKNLLRLTG |
| 1836 | LPRRLsDSPVFFFRKNLLRLTG |
| 1837 | LPRRLSDsPVFFFRKNLLRLTG |
| 1838 | LPRsPPLKVLFFRKNLLRLTG |
| 1839 | LPRsSRGLLFFRKNLLRLTG |
| 1840 | LPRSsRGLLFFRKNLLRLTG |
| 1841 | LPRSSsmAAGLFFRKNLLRLTG |
| 1842 | LPSARPLsLFFRKNLLRLTG |
| 1843 | LPsRLTKcFFRKNLLRLTG |
| 1844 | LPTsPLAmFFRKNLLRLTG |
| 1845 | LPtSPLAmEYFFRKNLLRLTG |
| 1846 | LPtSPLAMEYFFRKNLLRLTG |
| 1847 | LPTsPLAmEYFFRKNLLRLTG |
| 1848 | LPTsPLAMEYFFRKNLLRLTG |
| 1849 | LPVsPGHRKTFFRKNLLRLTG |
| 1850 | LPYPVsPKQKYFFRKNLLRLTG |
| 1851 | LQHSFsFAGFFFRKNLLRLTG |
| 1852 | LQIsPVSSYFFRKNLLRLTG |
| 1853 | LSKsSATLwFFRKNLLRLTG |
| 1854 | LSPtKLPSIFFRKNLLRLTG |
| 1855 | LSRTFKsLFFFRKNLLRLTG |
| 1856 | LsSSVIRELFFRKNLLRLTG |
| 1857 | LSsSVIRELFFRKNLLRLTG |
| 1858 | LTAsQILSRFFRKNLLRLTG |
| 1859 | LTDPsSPTISSYFFRKNLLRLTG |
| 1860 | LTDPSSPtISSYFFRKNLLRLTG |
| 1861 | LTKtLIKLFFRKNLLRLTG |
| 1862 | LVAsPRLEKFFRKNLLRLTG |
| 1863 | LVREPGsQAcLFFRKNLLRLTG |
| 1864 | mIIsPERLDPFFFRKNLLRLTG |
| 1865 | MIIsPERLDPFFFRKNLLRLTG |
| 1866 | MLPsPNEKLFFRKNLLRLTG |
| 1867 | MPFPAHLtYFFRKNLLRLTG |
| 1868 | mPHsPTLRVFFRKNLLRLTG |
| 1869 | mPHSPtLRVFFRKNLLRLTG |
| 1870 | MPHsPTLRVFFRKNLLRLTG |
| 1871 | MPHSPtLRVFFRKNLLRLTG |
| 1872 | MPKFRMPsLFFRKNLLRLTG |
| 1873 | MPQDLRsPAFFRKNLLRLTG |
| 1874 | mPREPsATRLFFRKNLLRLTG |
| 1875 | mPRQPsATRLFFRKNLLRLTG |
| 1876 | mPsPATLSHSLFFRKNLLRLTG |
| 1877 | MPsPATLSHSLFFRKNLLRLTG |
| 1878 | MPsPFRSSALFFRKNLLRLTG |
| 1879 | mPsPGGRITLFFRKNLLRLTG |
| 1880 | MPsPGGRITLFFRKNLLRLTG |
| 1881 | MPsPIMHPLILFFRKNLLRLTG |
| 1882 | MPsPLKGQHTLFFRKNLLRLTG |
| 1883 | MPsPSTLKKELFFRKNLLRLTG |
| 1884 | mPsPVSPKLFFRKNLLRLTG |
| 1885 | mPSPVsPKLFFRKNLLRLTG |
| 1886 | MPsPVSPKLFFRKNLLRLTG |
| 1887 | MPSPVsPKLFFRKNLLRLTG |
| 1888 | MPtSPGVDLFFRKNLLRLTG |
| 1889 | MPTsPGVDLFFRKNLLRLTG |
| 1890 | mRLsRELQLFFRKNLLRLTG |
| 1891 | MSKLINHtFFRKNLLRLTG |
| 1892 | mTKSsPLKIFFRKNLLRLTG |
| 1893 | NAIsLPTIFFRKNLLRLTG |
| 1894 | NAVsPSSGPSLFFRKNLLRLTG |
| 1895 | NAWsPVMRARFFRKNLLRLTG |
| 1896 | NHVtPPNVSLFFRKNLLRLTG |
| 1897 | NIPsFIVRLFFRKNLLRLTG |
| 1898 | NLLsPDGKmISVFFRKNLLRLTG |
| 1899 | NmDsPGPMLFFRKNLLRLTG |
| 1900 | NMDsPGPmLFFRKNLLRLTG |
| 1901 | NPIHsPSYPLFFRKNLLRLTG |
| 1902 | NPIHSPsYPLFFRKNLLRLTG |
| 1903 | NPsSPEFFmFFRKNLLRLTG |
| 1904 | NPsSPEFFMFFRKNLLRLTG |
| 1905 | NPSsPEFFmFFRKNLLRLTG |
| 1906 | NPSsPEFFMFFRKNLLRLTG |
| 1907 | NQGsPFKSALFFRKNLLRLTG |
| 1908 | NREsFQIFLFFRKNLLRLTG |
| 1909 | NRFsGGFGARDYFFRKNLLRLTG |
| 1910 | NRFsPKASLFFRKNLLRLTG |
| 1911 | NRHsLPFSLFFRKNLLRLTG |
| 1912 | NRHsLVEKLFFRKNLLRLTG |
| 1913 | NRLsLLVQKFFRKNLLRLTG |
| 1914 | NRMsRRIVLFFRKNLLRLTG |
| 1915 | NRSLHINNIsPGNTISFFRKNLLRLT |
| | G |
| 1916 | NRSsPVHIIFFRKNLLRLTG |
| 1917 | NSISSVVsRFFRKNLLRLTG |
| 1918 | NSLsPRSSLFFRKNLLRLTG |
| 1919 | NSVsPSESLFFRKNLLRLTG |
| 1920 | NVLsPLPSQFFRKNLLRLTG |
| 1921 | NVLsPLPSQAMFFRKNLLRLTG |
| 1922 | NVMKRKFsLFFRKNLLRLTG |
| 1923 | PEFPLsPPKKFFRKNLLRLTG |
| 1924 | PEVsPRPALFFRKNLLRLTG |
| 1925 | PIFSRLsIFFRKNLLRLTG |
| 1926 | PVSKPLsLFFRKNLLRLTG |
| 1927 | QEAsPRPLLFFRKNLLRLTG |
| 1928 | QLMtLENKLFFRKNLLRLTG |
| 1929 | QLPsPTATSQLFFRKNLLRLTG |
| 1930 | QPRNSLPAsPAHQLFFRKNLLRLTG |
| 1931 | QPRTPsPLVLFFRKNLLRLTG |
| 1932 | QRVPsYDSFFFRKNLLRLTG |
| 1933 | QSIsFSGLPSGRFFRKNLLRLTG |
| 1934 | QSSsWTRVFFFRKNLLRLTG |
| 1935 | QTIsPLSTYFFRKNLLRLTG |
| 1936 | QTPDFtPTKYFFRKNLLRLTG |
| 1937 | QTPsPRLALFFRKNLLRLTG |
| 1938 | QTRRPsYLEWFFRKNLLRLTG |
| 1939 | RAAsIENVLFFRKNLLRLTG |
| 1940 | RAAsSPDGFFwFFRKNLLRLTG |
| 1941 | RASsPDGFFwFFRKNLLRLIG |
| 1942 | RAAtPLPSLFFRKNLLRLTG |
| 1943 | RAAtPTLTTFFFRKNLLRLTG |
| 1944 | RAATPtLTTFFFRKNLLRLTG |
| 1945 | RAGsFSRFYFFRKNLLRLTG |
| 1946 | RAHtPTPGIYmFFRKNLLRLTG |
| 1947 | RAHtPTPGIYMFFRKNLLRLTG |
| 1948 | RAHTPtPGIYMFFRKNLLRLTG |
| 1949 | RALsHADLFFFRKNLLRLTG |
| 1950 | RALsLTRALFFRKNLLRLTG |
| 1951 | RNsFVGTAQYFFRKNLLRLTG |
| 1952 | RAPsYRTLELFFRKNLLRLTG |
| 1953 | RARsPVLWGWFFRKNLLRLTG |
| 1954 | RAsSLNFLNKFFRKNLLRLTG |
| 1955 | RASsLNFLNKFFRKNLLRLIG |
| 1956 | RAtSNVFAmFFRKNLLRLTG |
| 1957 | RAtSNVFAMFFRKNLLRLTG |
| 1958 | RATsNVFAmFFRKNLLRLTG |
| 1959 | RATsNVFAMFFRKNLLRLIG |
| 1960 | RAtSNVFAmFFFRKNLLRLTG |
| 1961 | RAtSNVFAMFFFRKNLLRLTG |
| 1962 | RATsNVFAmFFFRKNLLRLTG |
| 1963 | RATsNVFAMFFFRKNLLRLTG |
| 1964 | RATsPLVSLYFFRKNLLRLTG |
| 1965 | RAVsPFAKIFFRKNLLRLTG |
| 1966 | RAVsPHFDDmFFRKNLLRLTG |
| 1967 | RAVsPHFDDMFFRKNLLRLTG |
| 1968 | RAYsPLHGGSGSYFFRKNLLRLTG |
| 1969 | REAPsPLmFFRKNLLRLTG |
| 1970 | REAPsPLMFFRKNLLRLTG |
| 1971 | REAsIELPSmFFRKNLLRLTG |
| 1972 | REDsLEFSLFFRKNLLRLTG |
| 1973 | REDSLEFsLFFRKNLLRLTG |
| 1974 | REFSGPStPTGTLFFRKNLLRLTG |
| 1975 | REFSGPSTPtGTLFFRKNLLRLTG |
| 1976 | REImGtPEYLFFRKNLLRLTG |
| 1977 | RELsAPARLYFFRKNLLRLTG |
| 1978 | RELsGTIKEILFFRKNLLRLTG |
| 1979 | RELsPSSLKmFFRKNLLRLTG |
| 1980 | RELsPVSFQYFFRKNLLRLTG |
| 1981 | REPsESSPLALFFRKNLLRLTG |
| 1982 | REPSESsPLALFFRKNLLRLTG |
| 1983 | REPsPLPELALFFRKNLLRLTG |
| 1984 | REPsPVRYDNLFFRKNLLRLTG |
| 1985 | RERAFsVKFFFRKNLLRLTG |
| 1986 | REsPIPIEIFFRKNLLRLTG |
| 1987 | REsPRPLQLFFRKNLLRLTG |
| 1988 | RESsLGFQLFFRKNLLRLTG |
| 1989 | RETNLDsLPLFFRKNLLRLTG |
| 1990 | RETsMVHELFFRKNLLRLTG |
| 1991 | RETsPNRIGLFFRKNLLRLTG |
| 1992 | REVsPEPIVFFRKNLLRLTG |
| 1993 | RFQsmPVRLFFRKNLLRLTG |
| 1994 | RFQsMPVRLFFRKNLLRLTG |
| 1995 | RHKsDSISLFFRKNLLRLTG |
| 1996 | RHLPsPPTLFFRKNLLRLTG |
| 1997 | RIGsDPLAYFFRKNLLRLTG |
| 1998 | RIIEtPPHRYFFRKNLLRLTG |
| 1999 | RIKLGDyHFYFFRKNLLRLTG |
| 2000 | RILFsPFFHFFRKNLLRLTG |
| 2001 | RILsATTSGIFLFFRKNLLRLTG |
| 2002 | RILsDVTHSAVFFRKNLLRLTG |
| 2003 | RILsGVVTKmFFRKNLLRLTG |
| 2004 | RILsGVVTKMFFRKNLLRLTG |
| 2005 | RILsGVVTKMKMFFRKNLLRLTG |
| 2006 | RIMsPMRTGNTYFFRKNLLRLTG |
| 2007 | RIQsPLNNKLFFRKNLLRLTG |
| 2008 | RIRsIEALLFFRKNLLRLTG |
| 2009 | RItSLIVHVFFRKNLLRLTG |
| 2010 | RITsPVHVSFFFRKNLLRLTG |
| 2011 | RIVsPKNSDLKFFRKNLLRLTG |
| 2012 | RIWsPTIGRFFRKNLLRLTG |
| 2013 | RIWSPtIGRFFRKNLLRLTG |
| 2014 | RIYsRIDRLEAFFRKNLLRLTG |
| 2015 | RKFsAPGQLFFRKNLLRLTG |
| 2016 | RKLsFTESLFFRKNLLRLTG |
| 2017 | RKLSFtESLFFRKNLLRLTG |
| 2018 | RKLsGDQITLFFRKNLLRLTG |
| 2019 | RKLsVALAFFFRKNLLRLTG |
| 2020 | RKLsVLLLLFFRKNLLRLTG |
| 2021 | RKNsFVmEYFFRKNLLRLTG |
| 2022 | RKNsFVMEYFFRKNLLRLTG |
| 2023 | RKNsLISSLFFRKNLLRLTG |
| 2024 | RKSsIIIRmFFRKNLLRLTG |
| 2025 | RLAsLFSSLFFRKNLLRLTG |
| 2026 | RLAsLMNLGMFFRKNLLRLTG |
| 2027 | RLAsYLEKVFFRKNLLRLTG |
| 2028 | RLDsELKELFFRKNLLRLTG |
| 2029 | RLDsGHVWKLFFRKNLLRLTG |
| 2030 | RLFsKELRcFFRKNLLRLTG |
| 2031 | RLFsKSIETLFFRKNLLRLTG |
| 2032 | RLFsSFLKRFFRKNLLRLTG |
| 2033 | RLIsLSEQNLFFRKNLLRLTG |
| 2034 | RLISLsEQNLFFRKNLLRLTG |
| 2035 | RLIsQIVSSFFRKNLLRLTG |
| 2036 | RLIsQIVSSITAFFRKNLLRLTG |
| 2037 | RLIsVVSHLFFRKNLLRLTG |
| 2038 | RLKsIEERQLLKFFRKNLLRLTG |
| 2039 | RLLQDsVDFSLFFRKNLLRLTG |
| 2040 | RLLQDsVDSLFFRKNLLRLTG |
| 2041 | RLLsAAENFFFRKNLLRLIG |
| 2042 | RLLsEKILGLFFRKNLLRLTG |
| 2043 | RLLsIKEAFRLFFRKNLLRLTG |
| 2044 | RLLsVNIRVFFRKNLLRLTG |
| 2045 | RLNsPPSSIYKFFRKNLLRLTG |
| 2046 | RLPLPsPALFFRKNLLRLTG |
| 2047 | RLPsDPFTHLFFRKNLLRLTG |
| 2048 | RLPsPTSPFSSLFFRKNLLRLTG |
| 2049 | RLPSsTLKRFFRKNLLRLTG |
| 2050 | RLPtVLLKLFFRKNLLRLTG |
| 2051 | RLQHSFsFFFRKNLLRLTG |
| 2052 | RLRsSVPGVFFRKNLLRLTG |
| 2053 | RLRSsVPGVFFRKNLLRLTG |
| 2054 | RLRsYEDmIFFRKNLLRLTG |
| 2055 | RLsPVPVPRFFRKNLLRLTG |
| 2056 | RLsSVSVTYFFRKNLLRLTG |
| 2057 | RLSsVSVTYFFRKNLLRLTG |
| 2058 | RLWtPPEDYRLFFRKNLLRLTG |
| 2059 | RLYKsEPELFFRKNLLRLTG |
| 2060 | RLYsVSYLLFFRKNLLRLTG |
| 2061 | RmIsHSELRKLFFRKNLLRLTG |
| 2062 | RMIsHSELRKLFFRKNLLRLTG |
| 2063 | RMIsKLEAQVFFRKNLLRLTG |
| 2064 | RmKsPFGSSFFFRKNLLRLTG |
| 2065 | RMKsPFGSSFFFRKNLLRLTG |
| 2066 | RmLsLRDQRLFFRKNLLRLTG |
| 2067 | RmYsFDDVLFFRKNLLRLTG |
| 2068 | RNAsLERVLFFRKNLLRLTG |
| 2069 | RPADSAQLLsLFFRKNLLRLTG |
| 2070 | RPARsVPSIAAFFRKNLLRLTG |
| 2071 | RPAsPALLLFFRKNLLRLTG |
| 2072 | RPAsPLMHIFFRKNLLRLTG |
| 2073 | RPASPsLQLFFRKNLLRLTG |
| 2074 | RPFHGISTVsLPNSLFFRKNLLRLTG |
| 2075 | RPFsKPEIALFFRKNLLRLTG |
| 2076 | RPFsREMDLFFRKNLLRLTG |
| 2077 | RPHLSGRKLsLFFRKNLLRLTG |
| 2078 | RPHtPTPGIFFRKNLLRLTG |
| 2079 | RPHtPTPGIYmFFRKNLLRLTG |
| 2080 | RPHTPtPGIYMFFRKNLLRLTG |
| 2081 | RPIsPRIGAFFRKNLLRLTG |
| 2082 | RPIsVIGGVSFFRKNLLRLTG |
| 2083 | RPItPVYTVFFRKNLLRLTG |
| 2084 | RPItPVYTVAFFRKNLLRLTG |
| 2085 | RPKLHHSLsFFFRKNLLRLTG |
| 2086 | RPKPSSsPVIFFRKNLLRLTG |
| 2087 | RPKPSsSPVIFFFRKNLLRLTG |
| 2088 | RPKPSSsPVIFFFRKNLLRLTG |
| 2089 | RPKPsSSPVIFAFFRKNLLRLTG |
| 2090 | RPKPSsSPVIFAFFRKNLLRLTG |
| 2091 | RPKPSSsPVIFAFFRKNLLRLTG |
| 2092 | RPKsTPELAFFFRKNLLRLTG |
| 2093 | RPKtPPPAPFFRKNLLRLTG |
| 2094 | RPLsKQLSAFFRKNLLRLTG |
| 2095 | RPLsLIQGPPFFRKNLLRLTG |
| 2096 | RPLsPFYLFFRKNLLRLTG |
| 2097 | RPLsPFYLSAFFRKNLLRLTG |
| 2098 | RPLsPGALQLFFRKNLLRLTG |
| 2099 | RPLsPILHIVFFRKNLLRLTG |
| 2100 | RPLsPKPSSPGFFRKNLLRLTG |
| 2101 | RPLsPKPSSPGSVLFFRKNLLRLTG |
| 2102 | RPLSPKPsSPGSVLFFRKNLLRLTG |
| 2103 | RPLsPTRLQPALFFRKNLLRLTG |
| 2104 | RPLtPRTPAFFRKNLLRLTG |
| 2105 | RPNsLVGITSAFFRKNLLRLTG |
| 2106 | RPNSPsPTALFFRKNLLRLTG |
| 2107 | RPNsSALETLFFRKNLLRLTG |
| 2108 | RPNSsALETLFFRKNLLRLTG |
| 2109 | RPPsPGLRGLLFFRKNLLRLTG |
| 2110 | RPQESRsLSPSHLFFRKNLLRLTG |
| 2111 | RPQESRSLsPSHLFFRKNLLRLTG |
| 2112 | RPQsPPAEAVIFFRKNLLRLTG |
| 2113 | RPQtPKEEAQALFFRKNLLRLTG |
| 2114 | RPRAFsHSGVHSLFFRKNLLRLTG |
| 2115 | RPRAFsIASSLFFRKNLLRLTG |
| 2116 | RPREVtVSLFFRKNLLRLTG |
| 2117 | RPRFMsSPVLFFRKNLLRLTG |
| 2118 | RPRFMSsPVLFFRKNLLRLTG |
| 2119 | RPRGPsPLVTmFFRKNLLRLTG |
| 2120 | RPRGPsPLVTMFFRKNLLRLTG |
| 2121 | RPRLQHsFSFFFRKNLLRLTG |
| 2122 | RPRLQHSFsFFFRKNLLRLTG |
| 2123 | RPRPSsVLRTLFFRKNLLRLTG |
| 2124 | RPRPVsPSSLLDTAIFFRKNLLRLTG |
| 2125 | RPRSIsVEEFFFRKNLLRLTG |
| 2126 | RPRSLSsPTVTLFFRKNLLRLTG |
| 2127 | RPRsPNmQDLFFRKNLLRLTG |
| 2128 | RPRsPPEPLRVFFRKNLLRLTG |
| 2129 | RPRSPtGPSNSFFFRKNLLRLTG |
| 2130 | RPRtLRTRLFFRKNLLRLTG |
| 2131 | RPsSAPDLmFFRKNLLRLTG |
| 2132 | RPsSAPDLMFFRKNLLRLTG |
| 2133 | RPSsAPDLmFFRKNLLRLTG |
| 2134 | RPSsAPDLMFFRKNLLRLTG |
| 2135 | RPsSGFYELFFRKNLLRLTG |
| 2136 | RPsSGQDLFFFRKNLLRLTG |
| 2137 | RPSsGQDLFFFRKNLLRLTG |
| 2138 | RPSsLRQYLFFRKNLLRLTG |
| 2139 | RPSsPLIDIKPFFRKNLLRLTG |
| 2140 | RPsSPVHVAFFFRKNLLRLTG |
| 2141 | RPSsPVHVAFFFRKNLLRLTG |
| 2142 | RPSsPVTVTALFFRKNLLRLTG |
| 2143 | RPSsRVALmVLFFRKNLLRLTG |
| 2144 | RPSsRVALMVLFFRKNLLRLTG |
| 2145 | RPStPHTITLFFRKNLLRLTG |
| 2146 | RPsTPTINVLFFRKNLLRLTG |
| 2147 | RPStPTINVLFFRKNLLRLTG |
| 2148 | RPSTPtINVLFFRKNLLRLTG |
| 2149 | RPtSFADELFFRKNLLRLTG |
| 2150 | RPTsISWDGLFFRKNLLRLTG |
| 2151 | RPTSIsWDGLFFRKNLLRLTG |
| 2152 | RPTsPRLLTLFFRKNLLRLTG |
| 2153 | RPVDPRRRsLFFRKNLLRLTG |
| 2154 | RPVsEMFSLFFRKNLLRLTG |
| 2155 | RPVsMDARIQVFFRKNLLRLTG |
| 2156 | RPVsPGKDITAFFRKNLLRLTG |
| 2157 | RPVStDFAQYFFRKNLLRLTG |
| 2158 | RPVtPITNFFFRKNLLRLTG |
| 2159 | RPVtPPRTAFFRKNLLRLTG |
| 2160 | RPwsNSRGLFFRKNLLRLTG |
| 2161 | RPwsPAVSAFFRKNLLRLTG |
| 2162 | RPYPsPGAVLFFRKNLLRLTG |
| 2163 | RQAsIELPSMAFFRKNLLRLTG |
| 2164 | RQAsIELPSmAVFFRKNLLRLTG |
| 2165 | RQAsIELPSmAVAFFRKNLLRLTG |
| 2166 | RQAsIELPSmAVASTFFRKNLLRLTG |
| 2167 | RQAsIELPSMAVASTFFRKNLLRLTG |
| 2168 | RQASLsISVFFRKNLLRLTG |
| 2169 | RQFDEESLEsFFFRKNLLRLTG |
| 2170 | RQFTSSSsIFFRKNLLRLTG |
| 2171 | RQHFsPLSLFFRKNLLRLTG |
| 2172 | RQIQPsPPwSYFFRKNLLRLTG |
| 2173 | RQIQPsPPWSYFFRKNLLRLTG |
| 2174 | RQIsIRGIVGVFFRKNLLRLTG |
| 2175 | RQIsISEPQAFFRKNLLRLTG |
| 2176 | RQIsISEPQAFFFRKNLLRLTG |
| 2177 | RQIsISEPQAFLFFRKNLLRLTG |
| 2178 | RQIsISEPQAFLFFFRKNLLRLTG |
| 2179 | RQIsPEEFEYFFRKNLLRLTG |
| 2180 | RQKsPLFQFAFFRKNLLRLTG |
| 2181 | RQPsEEEIIFFRKNLLRLTG |
| 2182 | RQPsEEEIIKLFFRKNLLRLTG |
| 2183 | RQPsWDPSPVFFRKNLLRLTG |
| 2184 | RQRSLsTSGESLYFFRKNLLRLTG |
| 2185 | RQVsEDPDIDSLFFRKNLLRLTG |
| 2186 | RRAsLSDIGFFFRKNLLRLTG |
| 2187 | RRFRFPsGAELFFRKNLLRLTG |
| 2188 | RRFsDFLGLFFRKNLLRLTG |
| 2189 | RRFSFsGNTLFFRKNLLRLTG |
| 2190 | RRFsGLLNFFRKNLLRLTG |
| 2191 | RRFsGLLNcFFRKNLLRLTG |
| 2192 | RRFsGLLNCFFRKNLLRLTG |
| 2193 | RRFsGLSAELFFRKNLLRLTG |
| 2194 | RRFsLDTDYFFRKNLLRLTG |
| 2195 | RRFsPPRRMLFFRKNLLRLTG |
| 2196 | RRFsVTLRLFFRKNLLRLTG |
| 2197 | RRFtEIYEFFFRKNLLRLTG |
| 2198 | RRFtPPSTALFFRKNLLRLTG |
| 2199 | RRGsFDAFFRKNLLRLTG |
| 2200 | RRGsFDATFFRKNLLRLTG |
| 2201 | RRGsFDATGFFRKNLLRLTG |
| 2202 | RRGsFDATGSGFFRKNLLRLTG |
| 2203 | RRGsFDATGSGFFFRKNLLRLTG |
| 2204 | RRGsFDATGSGFSMFFRKNLLRLTG |
| 2205 | RRGsFDATGSGFSmTFFFRKNLLRLT |
| | G |
| 2206 | RRGsFDATGSGFSMTFFFRKNLLRLT |
| | G |
| 2207 | RRGsFEVTLLFFRKNLLRLTG |
| 2208 | RRGsGPEIFTFFFRKNLLRLTG |
| 2209 | RRGsPEMPFYFFRKNLLRLTG |
| 2210 | RRIDIsPSTFRKFFRKNLLRLTG |
| 2211 | RRIDISPsTLRKFFRKNLLRLTG |
| 2212 | RRISLtKRLFFRKNLLRLTG |
| 2213 | RRLDRRwtLFFRKNLLRLTG |
| 2214 | RRLDRRWtLFFRKNLLRLTG |
| 2215 | RRLsFQAEYWFFRKNLLRLTG |
| 2216 | RRLsLFLVLFFRKNLLRLTG |
| 2217 | RRLsVLVDDYFFRKNLLRLTG |
| 2218 | RRMsVGDRAGFFRKNLLRLTG |
| 2219 | RRMsVGDRAGSLPNYFFRKNLLRLTG |
| 2220 | RRNsLRIIFFFRKNLLRLTG |
| 2221 | RRPsQNAISFFFFRKNLLRLTG |
| 2222 | RRPtLTTFFFFRKNLLRLTG |
| 2223 | RRsDSLLSFFFRKNLLRLTG |
| 2224 | RRSDsLLSFFFRKNLLRLTG |
| 2225 | RRSIIsPNFFFRKNLLRLTG |
| 2226 | RRsSFSMEEGDVLFFRKNLLRLTG |
| 2227 | RRSsFSMEEGDVLFFRKNLLRLTG |
| 2228 | RRsSIPITVFFRKNLLRLTG |
| 2229 | RRSsISSWLFFRKNLLRLTG |
| 2230 | RRsSLLSLmFFRKNLLRLTG |
| 2231 | RRsSLLSLMFFRKNLLRLTG |
| 2232 | RRSsLLSLmFFRKNLLRLTG |
| 2233 | RRsSYLLAIFFRKNLLRLTG |
| 2234 | RRSsYLLAIFFRKNLLRLTG |
| 2235 | RRsTGVSFWFFRKNLLRLTG |
| 2236 | RRStGVSFWFFRKNLLRLTG |
| 2237 | RRTsIHDFLFFRKNLLRLTG |
| 2238 | RRVsLSEIGFFFRKNLLRLTG |
| 2239 | RRVsSNGIFDLFFRKNLLRLTG |
| 2240 | RRVSsNGIFDLFFRKNLLRLTG |
| 2241 | RRYsDFAKLFFRKNLLRLTG |
| 2242 | RSELLsFIKFFRKNLLRLTG |
| 2243 | RSFsADNFIGIQRFFRKNLLRLTG |
| 2244 | RSFsGLIKRFFRKNLLRLTG |
| 2245 | RSFsMHDLTTIFFRKNLLRLTG |
| 2246 | RSFsPKSPLELFFRKNLLRLTG |
| 2247 | RSFsPTmKVFFRKNLLRLTG |
| 2248 | RSFSPtMKVFFRKNLLRLTG |
| 2249 | RSFtPLSIFFRKNLLRLTG |
| 2250 | RSFtPLSILKFFRKNLLRLTG |
| 2251 | RSHsPPLKLFFRKNLLRLTG |
| 2252 | RSIRDsGYIDFFRKNLLRLTG |
| 2253 | RSIRDsGYIDcwFFRKNLLRLTG |
| 2254 | RSIRDsGYIDcWFFRKNLLRLTG |
| 2255 | RSISAsDLTFFFRKNLLRLTG |
| 2256 | RSIsNEGLTLFFRKNLLRLTG |
| 2257 | RSIsPLLFFFRKNLLRLTG |
| 2258 | RSIsPWLARFFRKNLLRLTG |
| 2259 | RSIsQSSTDSYFFRKNLLRLTG |
| 2260 | RSIsSLLRFFFRKNLLRLTG |
| 2261 | RSIsTPTcLFFRKNLLRLTG |
| 2262 | RSKsVIEQVFFRKNLLRLTG |
| 2263 | RSKsVIEQVSWFFRKNLLRLTG |
| 2264 | RSLsFSDEMFFRKNLLRLTG |
| 2265 | RSLsPFRRHFFRKNLLRLTG |
| 2266 | RSLsPIIGKDVLFFRKNLLRLTG |
| 2267 | RSLsPILPGRFFRKNLLRLTG |
| 2268 | RSLsPmSGLFFRKNLLRLTG |
| 2269 | RSLsPMSGLFFRKNLLRLTG |
| 2270 | RSLsPSSNSAFFFRKNLLRLTG |
| 2271 | RsLSQELVGVFFRKNLLRLTG |
| 2272 | RsLSVEIVYFFRKNLLRLTG |
| 2273 | RSLsVGSEFFFRKNLLRLTG |
| 2274 | RSLsVPVDLFFRKNLLRLTG |
| 2275 | RSLsVPVDLSRWFFRKNLLRLTG |
| 2276 | RSLtHPPTIFFRKNLLRLTG |
| 2277 | RSmDSVLtLFFRKNLLRLTG |
| 2278 | RSMDSVLtLFFRKNLLRLTG |
| 2279 | RSNsPLPSIFFRKNLLRLTG |
| 2280 | RSPsFGEDYYFFRKNLLRLTG |
| 2281 | RSPsQDFSFFFRKNLLRLTG |
| 2282 | RSQsLPNSLFFRKNLLRLTG |
| 2283 | RSRsAPPNLWFFRKNLLRLTG |
| 2284 | RSRsFDYNYFFRKNLLRLTG |
| 2285 | RSRsFDYNYRFFRKNLLRLTG |
| 2286 | RSRsFSGLIKRFFRKNLLRLTG |
| 2287 | RSRSFsGLIKRFFRKNLLRLTG |
| 2288 | RSRsPFSTTRFFRKNLLRLTG |
| 2289 | RSRsPLELEPEAKFFRKNLLRLTG |
| 2290 | RSRsPLGFYVFFRKNLLRLTG |
| 2291 | RSRsPLLKFFFRKNLLRLTG |
| 2292 | RSRsPSDSAAYFFFRKNLLRLTG |
| 2293 | RSRsVPVSFFFRKNLLRLTG |
| 2294 | RSSsFKDFAKFFRKNLLRLTG |
| 2295 | RSSsFSDTLFFRKNLLRLTG |
| 2296 | RSsSFVLPKFFRKNLLRLTG |
| 2297 | RSSsFVLPKFFRKNLLRLTG |
| 2298 | RsSSFVLPKLFFRKNLLRLTG |
| 2299 | RSsSFVLPKLFFRKNLLRLTG |
| 2300 | RSSsFVLPKLFFRKNLLRLTG |
| 2301 | RsSSLSDFSwFFRKNLLRLTG |
| 2302 | RsSSLSDFSWFFRKNLLRLTG |
| 2303 | RSsSLSDFSwFFRKNLLRLTG |
| 2304 | RSsSLSDFSWFFRKNLLRLTG |
| 2305 | RSSsLSDFSwFFRKNLLRLTG |
| 2306 | RSSsLSDFSWFFRKNLLRLTG |
| 2307 | RsSSPFLSKFFRKNLLRLTG |
| 2308 | RSsSPFLSKFFRKNLLRLTG |
| 2309 | RSSsPPILTKFFRKNLLRLTG |
| 2310 | RSsSTELLSHYFFRKNLLRLTG |
| 2311 | RSSsTELLSHYFFRKNLLRLTG |
| 2312 | RSSsWGRTYFFRKNLLRLTG |
| 2313 | RSStPLPTIFFRKNLLRLTG |
| 2314 | RsTSLSLKYFFRKNLLRLTG |
| 2315 | RStSLSLKYFFRKNLLRLTG |
| 2316 | RSTsLSLKYFFRKNLLRLTG |
| 2317 | RSVsFKLLERWFFRKNLLRLTG |
| 2318 | RSVsPVQDLFFRKNLLRLTG |
| 2319 | RSVsVATGLFFRKNLLRLTG |
| 2320 | RSWsPPPEVSRFFRKNLLRLTG |
| 2321 | RSYRTDIsMFFRKNLLRLTG |
| 2322 | RTAsPPALPKFFRKNLLRLTG |
| 2323 | RTFsDESNVLFFRKNLLRLTG |
| 2324 | RtFSLDTILFFRKNLLRLTG |
| 2325 | RTFsLDTILSSYFFRKNLLRLTG |
| 2326 | RTFSPtYGLFFRKNLLRLTG |
| 2327 | RtHSLLLLLFFRKNLLRLTG |
| 2328 | RtISAQDTLAYFFRKNLLRLTG |
| 2329 | RTIsAQDTLAYFFRKNLLRLTG |
| 2330 | RTIsNPEVVmKFFRKNLLRLTG |
| 2331 | RTIsNPEVVMKFFRKNLLRLIG |
| 2332 | RTKsFLNYYFFRKNLLRLTG |
| 2333 | RTLsESFSRIALKFFRKNLLRLTG |
| 2334 | RTLsGSILDVYFFRKNLLRLTG |
| 2335 | RtmSEAALVRKFFRKNLLRLTG |
| 2336 | RtMSEAALVRKFFRKNLLRLTG |
| 2337 | RTmsPIQVLFFRKNLLRLTG |
| 2338 | RTMsPIQVLFFRKNLLRLTG |
| 2339 | RTPsPARPALFFRKNLLRLTG |
| 2340 | RTRLsPPRAFFRKNLLRLTG |
| 2341 | RTVsPAHVLFFRKNLLRLTG |
| 2342 | RTYsFTSAmFFRKNLLRLTG |
| 2343 | RTYsFTSAMFFRKNLLRLTG |
| 2344 | RVASPtSGVFFRKNLLRLTG |
| 2345 | RVDSLVsLFFRKNLLRLTG |
| 2346 | RVDsTTcLFFFRKNLLRLTG |
| 2347 | RVDStTcLFFFRKNLLRLTG |
| 2348 | RVDSTtcLFFFRKNLLRLTG |
| 2349 | RVIsLEDFMEKFFRKNLLRLTG |
| 2350 | RVKTPtSQSYFFRKNLLRLTG |
| 2351 | RVKVDGPRsPSYFFRKNLLRLTG |
| 2352 | RVKVDGPRSPsYFFRKNLLRLTG |
| 2353 | RVLsPLmSRFFRKNLLRLTG |
| 2354 | RVLsPLMSRFFRKNLLRLTG |
| 2355 | RVPsINQKIFFRKNLLRLTG |
| 2356 | RVRsFLRGLPFFRKNLLRLTG |
| 2357 | RVRsPGTGAFFFRKNLLRLTG |
| 2358 | RVsSLTLHLFFRKNLLRLTG |
| 2359 | RVSsLTLHLFFRKNLLRLTG |
| 2360 | RVSSLtLHLFFRKNLLRLTG |
| 2361 | RVVLtPLKVFFRKNLLRLTG |
| 2362 | RVVsPGIDLFFRKNLLRLTG |
| 2363 | RVYsLDDIRRYFFRKNLLRLTG |
| 2364 | RVYsRFEVFFFRKNLLRLTG |
| 2365 | RVYYsPPVARRFFRKNLLRLTG |
| 2366 | RWNsKENLLFFRKNLLRLTG |
| 2367 | RYARYsPRQRFFRKNLLRLTG |
| 2368 | RYDsRTTIFFFRKNLLRLTG |
| 2369 | RYFKtPRKFFFRKNLLRLTG |
| 2370 | RYHsLAPmYYFFRKNLLRLTG |
| 2371 | RYHsLAPMYYFFRKNLLRLTG |
| 2372 | RYtNRVVTLFFRKNLLRLTG |
| 2373 | SAFsSRGSLSLFFRKNLLRLTG |
| 2374 | sAISPTPEIFFRKNLLRLTG |
| 2375 | SAIsPTPEIFFRKNLLRLTG |
| 2376 | SAYGGLTsPGLSYFFRKNLLRLTG |
| 2377 | SEAsLASALFFRKNLLRLTG |
| 2378 | SEFKAmDsIFFRKNLLRLTG |
| 2379 | SEFsDVDKLFFRKNLLRLTG |
| 2380 | SEIsPIKGSVRFFRKNLLRLTG |
| 2381 | SELRsPRISYFFRKNLLRLTG |
| 2382 | SELtPSESLFFRKNLLRLTG |
| 2383 | SELTPsESLFFRKNLLRLTG |
| 2384 | SEsSIKKKFLFFRKNLLRLTG |
| 2385 | SESsIKKKFLFFRKNLLRLTG |
| 2386 | SFDsREASFFFRKNLLRLTG |
| 2387 | SFLsQDESHDHSFFFRKNLLRLTG |
| 2388 | sGEGDFLAEGGGVRFFRKNLLRLTG |
| 2389 | SGFRsPHLwFFRKNLLRLTG |
| 2390 | SGFRsPHLWFFRKNLLRLTG |
| 2391 | SIDIsQDKLFFRKNLLRLTG |
| 2392 | sIDSPKSYIFFRKNLLRLTG |
| 2393 | SIFRtPISKFFRKNLLRLTG |
| 2394 | SIIKEKtVFFRKNLLRLTG |
| 2395 | SIIsPKVKMALFFRKNLLRLTG |
| 2396 | SIIsPNFSFFFRKNLLRLTG |
| 2397 | SILsRTPSVFFRKNLLRLTG |
| 2398 | sIPSLVDGFFFRKNLLRLTG |
| 2399 | SIPsLVDGFFFRKNLLRLTG |
| 2400 | SIPTVsGQIFFRKNLLRLTG |
| 2401 | SISsIDRELFFRKNLLRLTG |
| 2402 | SISsmEVNVFFRKNLLRLTG |
| 2403 | SIsTLVTLFFRKNLLRLTG |
| 2404 | SIStLVTLFFRKNLLRLTG |
| 2405 | SItSLEAIIFFRKNLLRLTG |
| 2406 | SIVsPRKLPALFFRKNLLRLTG |
| 2407 | SKMAFLtRVAFFRKNLLRLTG |
| 2408 | SLAsKVTRLFFRKNLLRLTG |
| 2409 | SLAsLLAKVFFRKNLLRLTG |
| 2410 | SLDsPGPEKmALFFRKNLLRLTG |
| 2411 | SLDsPGPEKMALFFRKNLLRLTG |
| 2412 | SLFGsPVAKFFRKNLLRLTG |
| 2413 | SLFHtPKFVFFRKNLLRLTG |
| 2414 | SLFSsEESNLGAFFRKNLLRLTG |
| 2415 | SLLsELQHAFFRKNLLRLTG |
| 2416 | SLLsLSATVFFRKNLLRLTG |
| 2417 | SLLsVSHALFFRKNLLRLTG |
| 2418 | SLLtPVRLPSIFFRKNLLRLTG |
| 2419 | SLmsGTLESLFFRKNLLRLTG |
| 2420 | SLmSGtLESLFFRKNLLRLTG |
| 2421 | SLMSGtLESLFFRKNLLRLTG |
| 2422 | SLSsERYYLFFRKNLLRLTG |
| 2423 | SLsSLRAHLEYFFRKNLLRLTG |
| 2424 | SLSsLRAHLEYFFRKNLLRLTG |
| 2425 | SmKsPLYLVSRFFRKNLLRLTG |
| 2426 | SMKsPLYLVSRFFRKNLLRLTG |
| 2427 | SPAARSLsLFFRKNLLRLTG |
| 2428 | SPAsPLKELFFRKNLLRLTG |
| 2429 | SPDIsPPIFRRFFRKNLLRLTG |
| 2430 | SPFKRQLsFFRKNLLRLTG |
| 2431 | SPFLSKRsLFFRKNLLRLTG |
| 2432 | SPFSSRsPSLFFRKNLLRLTG |
| 2433 | SPGsPWKTKLFFRKNLLRLTG |
| 2434 | sPHSPFYQLFFRKNLLRLTG |
| 2435 | SPHsPFYQLFFRKNLLRLTG |
| 2436 | SPIsDEEERLFFRKNLLRLTG |
| 2437 | SPIsPRTQDALFFRKNLLRLTG |
| 2438 | SPIsPTRQDALFFRKNLLRLTG |
| 2439 | SPITSsPPKWFFRKNLLRLTG |
| 2440 | SPKPPtRSPFFRKNLLRLTG |
| 2441 | SPKPPTRsPFFRKNLLRLTG |
| 2442 | SPPsPARWSLFFRKNLLRLTG |
| 2443 | SPRAGsPFFFRKNLLRLTG |
| 2444 | SPRAGsPFSPPPSSSSLFFRKNLLRL |
| | TG |
| 2445 | SPRLVsRSSSVLFFRKNLLRLTG |
| 2446 | SPRPPNSPsIFFRKNLLRLTG |
| 2447 | SPRPPNsPSISIFFRKNLLRLTG |
| 2448 | SPRPtSAPAIFFRKNLLRLTG |
| 2449 | SPRPTsAPAIFFRKNLLRLTG |
| 2450 | SPRRPsRVSEFFFRKNLLRLTG |
| 2451 | SPRRPsRVSEFLFFRKNLLRLTG |
| 2452 | sPRSPISPELFFRKNLLRLTG |
| 2453 | SPRsPISPELFFRKNLLRLTG |
| 2454 | sPRSPSTTYLFFRKNLLRLTG |
| 2455 | SPRsPTTTLFFRKNLLRLTG |
| 2456 | SPRsPVNKTTLFFRKNLLRLTG |
| 2457 | sPRSPVPTTLFFRKNLLRLTG |
| 2458 | SPRsPVPTTLFFRKNLLRLTG |
| 2459 | sPRTPPPLTVFFRKNLLRLTG |
| 2460 | SPRtPPPLTVFFRKNLLRLTG |
| 2461 | SPRTPtPFKHALFFRKNLLRLTG |
| 2462 | SPRtPVSPVKFFFRKNLLRLTG |
| 2463 | SPsPLPVALFFRKNLLRLTG |
| 2464 | SPsPmDPHMFFRKNLLRLTG |
| 2465 | SPsPMDPHmFFRKNLLRLTG |
| 2466 | SPsPMDPHMFFRKNLLRLTG |
| 2467 | SPtSPDYSLFFRKNLLRLTG |
| 2468 | SPtSPFSSLFFRKNLLRLTG |
| 2469 | SPTsPFSSLFFRKNLLRLTG |
| 2470 | SPVNKVRRVsFFFRKNLLRLTG |
| 2471 | SPVsPKSLAFFFRKNLLRLTG |
| 2472 | SPVsPmKELFFRKNLLRLTG |
| 2473 | SQDsPIFmFFRKNLLRLTG |
| 2474 | SQDsPIFMFFRKNLLRLTG |
| 2475 | SQILRTPsLFFRKNLLRLTG |
| 2476 | SRFHsPSTTWFFRKNLLRLTG |
| 2477 | SRFsGGFGAFFRKNLLRLTG |
| 2478 | SRFsGGFGARDYFFRKNLLRLTG |
| 2479 | SRHsGPFFTFFFRKNLLRLTG |
| 2480 | SRKEsYSVYVYFFRKNLLRLTG |
| 2481 | SRKsFVFELFFRKNLLRLTG |
| 2482 | SRLsLRRFFRKNLLRLTG |
| 2483 | SRLsLRRSLFFRKNLLRLTG |
| 2484 | SRPSmsPTPLFFRKNLLRLTG |
| 2485 | SRPSMsPTPLFFRKNLLRLTG |
| 2486 | SRRsIFEMYFFRKNLLRLTG |
| 2487 | SRSsPLKLFFRKNLLRLTG |
| 2488 | SSIsPSTLTLKFFRKNLLRLTG |
| 2489 | SSLsGEELVTKFFRKNLLRLTG |
| 2490 | SSLSsPLNPKFFRKNLLRLTG |
| 2491 | SSSsPFKFKFFRKNLLRLTG |
| 2492 | STAsAITPSVSRFFRKNLLRLTG |
| 2493 | STGGGTVIsRFFRKNLLRLTG |
| 2494 | STsLEKNNVFFRKNLLRLTG |
| 2495 | SVFsPSFGLKFFRKNLLRLTG |
| 2496 | SVIsDDSVLFFRKNLLRLTG |
| 2497 | SVIsGISSRFFRKNLLRLTG |
| 2498 | SVISsPLLKFFRKNLLRLTG |
| 2499 | SVLsPLLNKFFRKNLLRLTG |
| 2500 | SVLsPTSWEKFFRKNLLRLTG |
| 2501 | SVLsYTSVRFFRKNLLRLTG |
| 2502 | SVLtPLLLRFFRKNLLRLTG |
| 2503 | SVPEFPLsPPKKFFRKNLLRLTG |
| 2504 | SVQsDQGYISRFFRKNLLRLTG |
| 2505 | SVSsLEVHFFFRKNLLRLTG |
| 2506 | SVTsPIKmKFFRKNLLRLTG |
| 2507 | SVTsPIKMKFFRKNLLRLTG |
| 2508 | SVVsFDKVKEPRFFRKNLLRLTG |
| 2509 | SVVsGSEMSGKYFFRKNLLRLTG |
| 2510 | SVYsPSGPVNRFFRKNLLRLTG |
| 2511 | SVYSPsGPVNRFFRKNLLRLTG |
| 2512 | SYPsPVPTSFFFRKNLLRLTG |
| 2513 | SYVTTSTRTYsLGFFRKNLLRLTG |
| 2514 | SYYsPSIGFSYFFRKNLLRLTG |
| 2515 | TAIsPPLSVFFRKNLLRLTG |
| 2516 | TELPKRLsLFFRKNLLRLTG |
| 2517 | TESsPGSRQIQLwFFRKNLLRLTG |
| 2518 | TESsPGSRQIQLWFFRKNLLRLTG |
| 2519 | TEVsPSRTIFFRKNLLRLTG |
| 2520 | THALPEsPRLFFRKNLLRLTG |
| 2521 | THDsPFcLFFRKNLLRLTG |
| 2522 | THIsPNAIFFFRKNLLRLTG |
| 2523 | THIsPNAIFKAFFRKNLLRLTG |
| 2524 | TIFsPEGRLYFFRKNLLRLTG |
| 2525 | TImsPAVLKFFRKNLLRLTG |
| 2526 | TIMsPAVLKFFRKNLLRLTG |
| 2527 | TIRSPtTVLFFRKNLLRLTG |
| 2528 | TLAsPSVFKFFRKNLLRLTG |
| 2529 | TLLAsPmLKFFRKNLLRLTG |
| 2530 | TLLsAAHEVELFFRKNLLRLTG |
| 2531 | TLLsPKHKYFFRKNLLRLTG |
| 2532 | TLPsPDKLPGFFFRKNLLRLTG |
| 2533 | TLSCPVtEVIFFRKNLLRLTG |
| 2534 | TLsSIRHMIFFRKNLLRLTG |
| 2535 | TLSsIRHmIFFRKNLLRLTG |
| 2536 | TLSsIRHMIFFRKNLLRLTG |
| 2537 | TLYPRSFsVFFRKNLLRLTG |
| 2538 | TmFLRETsLFFRKNLLRLTG |
| 2539 | TMFLREtSLFFRKNLLRLTG |
| 2540 | TMFLRETsLFFRKNLLRLTG |
| 2541 | TmLsPREKIFYYFFRKNLLRLTG |
| 2542 | TMLsPREKIFYYFFRKNLLRLTG |
| 2543 | TPAGSARGsPTRPNPPFFRKNLLRLT |
| | G |
| 2544 | TPHtPKSLLFFRKNLLRLTG |
| 2545 | TPIsPGRASGmTTLFFRKNLLRLTG |
| 2546 | TPIsPGRASGMTTLFFRKNLLRLTG |
| 2547 | tPPSSEKLVSVMFFRKNLLRLTG |
| 2548 | TPQPsKDTLLFFRKNLLRLTG |
| 2549 | TPsPARPALFFRKNLLRLTG |
| 2550 | TPVsPVKFFFRKNLLRLTG |
| 2551 | TQRKFsLQFFFRKNLLRLTG |
| 2552 | TRDsLLIHLFFRKNLLRLTG |
| 2553 | TSEtPQPPRFFRKNLLRLTG |
| 2554 | TSIsPALARFFRKNLLRLTG |
| 2555 | TSVGsPSNTIGRFFRKNLLRLTG |
| 2556 | TSYNSISSVVsRFFRKNLLRLTG |
| 2557 | TTEVIRKGsITEYFFRKNLLRLTG |
| 2558 | tTGSPTEFLFFRKNLLRLTG |
| 2559 | TtGSPTEFLFFRKNLLRLTG |
| 2560 | TTGsPTEFLFFRKNLLRLTG |
| 2561 | TVFsPDGHLFFFRKNLLRLTG |
| 2562 | TVFSPtLPAAFFRKNLLRLIG |
| 2563 | TVFsPTLPAARFFRKNLLRLTG |
| 2564 | TVFtPVEEKFFRKNLLRLTG |
| 2565 | TVKQKYLsFFFRKNLLRLTG |
| 2566 | TVNsPAIYKFFRKNLLRLTG |
| 2567 | TVNsPAIYKFFFRKNLLRLTG |
| 2568 | TVStPPPFQGRFFRKNLLRLTG |
| 2569 | TVsTVGISIFFRKNLLRLTG |
| 2570 | TVVsPRALELFFRKNLLRLTG |
| 2571 | TVYSsEEAELLKFFRKNLLRLTG |
| 2572 | TYDDRAYSsFFFRKNLLRLTG |
| 2573 | TYVsSFYHAFFFRKNLLRLTG |
| 2574 | VAKRNsLKELWFFRKNLLRLTG |
| 2575 | VARsPLKEFFFRKNLLRLTG |
| 2576 | VEHsPFSSFFFRKNLLRLTG |
| 2577 | VELsPARSwFFRKNLLRLTG |
| 2578 | VELsPARSWFFRKNLLRLTG |
| 2579 | VELsPLKGSVSWFFRKNLLRLTG |
| 2580 | VETsFRKLSFFFRKNLLRLTG |
| 2581 | VETSFRKLsFFFRKNLLRLTG |
| 2582 | VIDsQELSKFFRKNLLRLTG |
| 2583 | VIKsPSWQRFFRKNLLRLTG |
| 2584 | VImsIRTKLFFRKNLLRLTG |
| 2585 | VIMsIRTKLFFRKNLLRLTG |
| 2586 | VLAsPLKTGRFFRKNLLRLTG |
| 2587 | VLFSsPPQmFFRKNLLRLTG |
| 2588 | VLGsQEALHPVFFRKNLLRLTG |
| 2589 | VLPSQVYsLFFRKNLLRLTG |
| 2590 | VmDsPVHLFFRKNLLRLTG |
| 2591 | VmFRtPLASVFFRKNLLRLTG |
| 2592 | VPFKRLsVVFFFRKNLLRLTG |
| 2593 | VPKGPIHsPVELFFRKNLLRLTG |
| 2594 | VPKKPPPsPFFRKNLLRLTG |
| 2595 | VPNEEDPsLFFRKNLLRLTG |
| 2596 | VPRsPFKVKVLFFRKNLLRLTG |
| 2597 | VPRsPVIKIFFRKNLLRLTG |
| 2598 | VPRtPVGKFFFRKNLLRLTG |
| 2599 | VPSsPLRKAFFRKNLLRLTG |
| 2600 | VPTsPKGRLLFFRKNLLRLTG |
| 2601 | VRKsRAWVLFFRKNLLRLTG |
| 2602 | VRTPSVQsLFFRKNLLRLTG |
| 2603 | VSFsPTDHSLFFRKNLLRLTG |
| 2604 | VSSsPRELLFFRKNLLRLTG |
| 2605 | VVSsPKLAPKFFRKNLLRLTG |
| 2606 | VYIPmsPGAHHFFFRKNLLRLTG |
| 2607 | VYIPMsPGAHHFFFRKNLLRLTG |
| 2608 | VYLPTHtSLFFRKNLLRLTG |
| 2609 | VYLPTHTsLFFRKNLLRLTG |
| 2610 | VYLPTHtSLLFFRKNLLRLTG |
| 2611 | VYLPTHTsLLFFRKNLLRLTG |
| 2612 | VYTsVQAQYFFRKNLLRLTG |
| 2613 | WEDRPStPTILFFRKNLLRLTG |
| 2614 | WEFGKRDsLFFRKNLLRLTG |
| 2615 | WPRsPGRAFLFFRKNLLRLTG |
| 2616 | WVIGsPEILRFFRKNLLRLTG |
| 2617 | YAFsPKIGRFFRKNLLRLTG |
| 2618 | yEKIHLDFLFFRKNLLRLTG |
| 2619 | YEVEPYsPGLFFRKNLLRLTG |
| 2620 | YHLsPRAFLFFRKNLLRLTG |
| 2621 | YILDSsPEKLFFRKNLLRLTG |
| 2622 | YLRsVGDGETVFFRKNLLRLTG |
| 2623 | YLVsPITGEKIFFRKNLLRLTG |
| 2624 | YPDPHsPFAFFRKNLLRLTG |
| 2625 | YPFLDsPNKYSLFFRKNLLRLTG |
| 2626 | YPSFRRSsLFFRKNLLRLTG |
| 2627 | YPtPYPDELFFRKNLLRLTG |
| 2628 | YQLsPTKLPSINFFRKNLLRLTG |
| 2629 | YQRPFSPsAYFFRKNLLRLTG |
| 2630 | YQYsDQGIDYFFRKNLLRLTG |
| 2631 | YRLsPEPTPLFFRKNLLRLTG |
| 2632 | YRPsYSYDYFFRKNLLRLTG |
| 2633 | YRPsYSYDYEFDFFRKNLLRLTG |
| 2634 | YRYDGQHFsLFFRKNLLRLTG |
| 2635 | YRYsLEKALFFRKNLLRLTG |
| 2636 | YSLDsPGPEKmALFFRKNLLRLTG |
| 2637 | YSLDsPGPEKMALFFRKNLLRLTG |
| 2638 | YSLsPSKSYKYFFRKNLLRLTG |
| 2639 | YSmsPGAMRFFRKNLLRLTG |
| 2640 | YSMsPGAmRFFRKNLLRLTG |
| 2641 | YSMsPGAMRFFRKNLLRLTG |
| 2642 | YVKLTPVsLFFRKNLLRLTG |
| 2643 | YVSsPDPQLFFRKNLLRLTG |
| 2644 | YYFsPSGKKFFFRKNLLRLTG |
| 2645 | yYISPRITFFFRKNLLRLTG |
| 3997 | DIAsLVGHEFFFRKNLLRLTG |
| 3998 | DIVsEYTHYFFRKNLLRLTG |
| 3999 | DSADLPPPsALFFRKNLLRLTG |
| 4000 | DVIDsQELSKVSREFFFRKNLLRLTG |
| 4001 | ETRSPsPISIFFRKNLLRLTG |
| 4002 | FKmIRSQsLFFRKNLLRLTG |
| 4003 | GAVsPGALRFFRKNLLRLTG |
| 4004 | GLPsPRGPGLFFRKNLLRLTG |
| 4005 | GRILsGVVTKFFRKNLLRLTG |
| 4006 | GRMIRAEsGPDLRYFFRKNLLRLTG |
| 4007 | GRmIRAEsGPDLRYFFRKNLLRLTG |
| 4008 | HPDGtPPKLFFRKNLLRLTG |
| 4009 | HPHLRKVsVFFRKNLLRLTG |
| 4010 | HRRIDIsPSTLFFRKNLLRLTG |
| 4011 | KAsSLISLLFFRKNLLRLTG |
| 4012 | KASsLISLLFFRKNLLRLTG |
| 4013 | KIPsAVSTVSMFFRKNLLRLTG |
| 4014 | KRFsMVVQDGIVKFFRKNLLRLTG |
| 4015 | KRFsmVVQDGIVKFFRKNLLRLTG |
| 4016 | KRFStEEFVLLFFRKNLLRLTG |
| 4017 | KRIsISISFFRKNLLRLTG |
| 4018 | KRIsISTSGFFRKNLLRLTG |
| 4019 | KRIsISTSGGFFRKNLLRLTG |
| 4020 | KRLsLDSSLVEYFFRKNLLRLTG |
| 4021 | KRLsLPADIRLFFRKNLLRLTG |
| 4022 | KRTsKYFSLFFRKNLLRLTG |
| 4023 | LPRsSSMAAGLFFRKNLLRLTG |
| 4024 | LPRSsSMAAGLFFRKNLLRLTG |
| 4025 | LQHsFSFAGFFFRKNLLRLTG |
| 4026 | LtSKLSTKDFFRKNLLRLTG |
| 4027 | NPTMLRTHsLFFRKNLLRLTG |
| 4028 | NRsSPVHIIFFRKNLLRLTG |
| 4029 | QVLPKtVKLFFFRKNLLRLTG |
| 4030 | RLPSPtSPFSSLFFRKNLLRLTG |
| 4031 | RPKLHHsLSFFFRKNLLRLTG |
| 4032 | RPRsDSLILFFRKNLLRLTG |
| 4033 | RQPswDPSPVFFRKNLLRLTG |
| 4034 | RRAsAPLPGLFFRKNLLRLTG |
| 4035 | RRASLsEIGFFRKNLLRLTG |
| 4036 | RRAsLSEIGFFRKNLLRLTG |
| 4037 | RRFsADEQFFFFRKNLLRLTG |
| 4038 | RRFsFSANFYFFRKNLLRLTG |
| 4039 | RRFsPPSSSLFFRKNLLRLTG |
| 4040 | RRIDIsPSFFRKNLLRLTG |
| 4041 | RRIsIVENcFFFRKNLLRLTG |
| 4042 | RRLPIFsRLSIFFRKNLLRLTG |
| 4043 | RRLsAIFLRLFFRKNLLRLTG |
| 4044 | RRLsFLVSYIFFRKNLLRLTG |
| 4045 | RRLsFTLERLFFRKNLLRLTG |
| 4046 | RRLsIEGNIAVFFRKNLLRLTG |
| 4047 | RRLsPPTLLFFRKNLLRLTG |
| 4048 | RSFSPtmKVFFRKNLLRLTG |
| 4049 | RSsSFTFHIFFRKNLLRLTG |
| 4050 | RSSsFTFHIFFRKNLLRLTG |
| 4051 | RtAATEVSLFFRKNLLRLTG |
| 4052 | RVDsTTCLFFFRKNLLRLTG |
| 4053 | RVDsTTcLFPFFRKNLLRLTG |
| 4054 | RVPsEHPYLFFRKNLLRLTG |
| 4055 | SAITPSVSRTsFFFRKNLLRLTG |
| 4056 | SEGsEPALLHFFRKNLLRLTG |
| 4057 | SIAsPDVKLNLFFRKNLLRLTG |
| 4058 | SIKsDVPVYFFRKNLLRLTG |
| 4059 | SLALtPPQAFFRKNLLRLTG |
| 4060 | SLKsRLRFFRKNLLRLTG |
| 4061 | SLPsPHPVRYFFRKNLLRLTG |
| 4062 | SPRPSPVPKPsPPLFFRKNLLRLTG |
| 4063 | SRFsSGGAFFRKNLLRLTG |
| 4064 | SRIVRTPsLFFRKNLLRLTG |
| 4065 | SRTSFTSVsRFFRKNLLRLTG |
| 4066 | TMPTsLPNLFFRKNLLRLTG |
| 4067 | TRLsPIAPAPGFFFRKNLLRLTG |
| 4068 | TSNsQKYmSFFFRKNLLRLTG |
| 4069 | TSTSRYLsLFFRKNLLRLTG |
| 4070 | VKTsGSSDRLFFRKNLLRLTG |
| 4071 | NIKsPALAFFFRKNLLRLTG |
| 4072 | LsPRAVSTTFFFRKNLLRLTG |
| 4172 | AHDPSGMFRSQsFFFRKNLLRLTG |
| 4173 | RVAsPAYSLFFRKNLLRLTG |
| 4174 | RRWtLGGMVNRFFRKNLLRLTG |
| 4175 | SIPSTLVsFFFRKNLLRLTG |
| 4176 | RRGsYPFIDFFFRKNLLRLTG |
| 4177 | LtLDQAYSYFFRKNLLRLTG |
| 4178 | SPPsPVEREmFFRKNLLRLTG |
| 4179 | SPPsPVEREMFFRKNLLRLTG |
| 4180 | LYVLsALLIFFRKNLLRLTG |
| 4181 | RPRsLSSPTVFFRKNLLRLTG |
| 4182 | LPIFNRIsVFFRKNLLRLTG |
| 4183 | IPRYHSQsPSmFFRKNLLRLTG |
| 4184 | SPLVRRPsLFFRKNLLRLTG |
| 4185 | EAPKVSRsLFFRKNLLRLTG |
| 4186 | SLDSPsYVLYFFRKNLLRLTG |
| 4187 | REYsPPYAPFFRKNLLRLTG |
| 4188 | YGYEGSEsIFFRKNLLRLTG |
| 4189 | RPSsLPLDFFFRKNLLRLTG |
| 4190 | RPsSLPLDFFFRKNLLRLTG |
| 4191 | TPItPLKDGFFFRKNLLRLTG |
| 4192 | KRFsFKKSFKLFFRKNLLRLTG |
| 4193 | KRNsRLGFLYFFRKNLLRLTG |
| 4194 | RRAsAILPGVLFFRKNLLRLTG |

‘s’, ‘t’, and ‘y’ stand for phosphoserine, phosphothreonine, and phosphotyrosine, respectively.
‘m’ stands for oxidized methionine.
‘w’ stands for oxidized tryptophan.
‘c’ stands for cysteinylated cysteine.

TABLE 4
Amino acid sequences of exemplary
antigenic polypeptides

| SEQ | |
|---|---|
| ID | |
| NO | Amino Acid Sequence |
| 2646 | AELGRLsPRAYFFRKNWLRLTW |
| 2647 | AESImsFHIFFRKNWLRLTW |
| 2648 | AESIMsFHIFFRKNWLRLTW |
| 2649 | AEsLKSLSSELFFRKNWLRLTW |
| 2650 | AEtPDIKLFFFRKNWLRLTW |
| 2651 | AGFsFVNPKFFRKNWLRLTW |
| 2652 | AHDPSGmFRSQsFFFRKNWLRLTW |
| 2653 | ALDSGAsLLHLFFRKNWLRLTW |
| 2654 | ALmGsPQLVAAFFRKNWLRLTW |
| 2655 | ALPPGSYAsLFFRKNWLRLTW |
| 2656 | ALPTPALsPSLMFFRKNWLRLTW |
| 2657 | ALSsSFLVLFFRKNWLRLTW |
| 2658 | ALSSsFLVLFFRKNWLRLTW |
| 2659 | ALStPVVEKFFRKNWLRLTW |
| 2660 | ALVDGyFRLFFRKNWLRLTW |
| 2661 | ALwsPGLAKFFRKNWLRLTW |
| 2662 | AmLGSKsPDPYRLFFRKNWLRLTW |
| 2663 | APAsPFRQLFFRKNWLRLTW |
| 2664 | APAsPLRPLFFRKNWLRLTW |
| 2665 | APAsPNHAGVLFFRKNWLRLTW |
| 2666 | APFHLtPTLYFFRKNWLRLTW |
| 2667 | APKsPSSEWLFFRKNWLRLTW |
| 2668 | APRtPPGVTFFFRKNWLRLTW |
| 2669 | APsSPDVKLFFRKNWLRLTW |
| 2670 | APSsPDVKLFFRKNWLRLTW |
| 2671 | APTsPLGHLFFRKNWLRLTW |
| 2672 | APVsPRPGLFFRKNWLRLTW |
| 2673 | ARFsGFYSmFFRKNWLRLTW |
| 2674 | ARFsGFYSMFFRKNWLRLTW |
| 2675 | ARFsPKVSLFFRKNWLRLTW |
| 2676 | ARGIsPIVFFFRKNWLRLTW |
| 2677 | ARYsGSYNDYFFRKNWLRLTW |
| 2678 | ASFKAELsYFFRKNWLRLTW |
| 2679 | ASFtPTSILKFFRKNWLRLTW |
| 2680 | ASFtPTSILKRFFRKNWLRLTW |
| 2681 | ASLsPSVSKFFRKNWLRLTW |
| 2682 | ATIsPPLQPKFFRKNWLRLTW |
| 2683 | AVILPPLsPYFKFFRKNWLRLTW |
| 2684 | AVLEyLKIFFRKNWLRLTW |
| 2685 | AVNQFsPSLARFFRKNWLRLTW |
| 2686 | AVRNFsPTDYYFFRKNWLRLTW |
| 2687 | AVRNFSPtDYYFFRKNWLRLTW |
| 2688 | AWRRLsRDSGGYFFRKNWLRLTW |
| 2689 | AYGGLtSPGLSYFFRKNWLRLTW |
| 2690 | AYGGLTsPGLSYFFRKNWLRLTW |
| 2691 | AYSsYVHQYFFRKNWLRLTW |
| 2692 | CtFGSRQIFFRKNWLRLTW |
| 2693 | DFAsPFHERFFRKNWLRLTW |
| 2694 | DFHsPIVLGRFFRKNWLRLTW |
| 2695 | DIAsPTFRRLFFRKNWLRLTW |
| 2696 | DIIRQPsEEEIIKFFRKNWLRLTW |
| 2697 | DIKsVFEAFFFRKNWLRLTW |
| 2698 | DILsPRLIRFFRKNWLRLTW |
| 2699 | DIRRFsLTTLRFFRKNWLRLTW |
| 2700 | DIsPPIFRRFFRKNWLRLTW |
| 2701 | DLtLKKEKFFFRKNWLRLTW |
| 2702 | DMLGLtKPAMPMFFRKNWLRLTW |
| 2703 | DNFsPDLRVLRFFRKNWLRLTW |
| 2704 | DPFGRPTsFFFRKNWLRLTW |
| 2705 | DPLIRWDsYFFRKNWLRLTW |
| 2706 | DPSLDLHsLFFRKNWLRLTW |
| 2707 | DSDPmLsPRFYFFRKNWLRLTW |
| 2708 | DSDPMLsPRFYFFRKNWLRLTW |
| 2709 | DSDPmLsPRFYAYFFRKNWLRLTW |
| 2710 | DSDPMLsPRFYAYFFRKNWLRLTW |
| 2711 | DsGEGDFLAEGGGVRFFRKNWLRLTW |
| 2712 | DSKsPLGFYFFRKNWLRLTW |
| 2713 | DTIsLASERYFFRKNWLRLTW |
| 2714 | DTIsPTLGFFFRKNWLRLTW |
| 2715 | DTQSGsLLFIGRFFRKNWLRLTW |
| 2716 | DTsSLPTVIMRFFRKNWLRLTW |
| 2717 | DTSsLPTVImRFFRKNWLRLTW |
| 2718 | DTSsLPTVIMRFFRKNWLRLTW |
| 2719 | DTTsLRTLRIFFRKNWLRLTW |
| 2720 | DVAsPDGLGRLFFRKNWLRLTW |
| 2721 | DVAsPTLRFFRKNWLRLTW |
| 2722 | DVAsPTLRRFFRKNWLRLTW |
| 2723 | DVAsPTLRRLFFRKNWLRLTW |
| 2724 | DVIDsQELSKVFFRKNWLRLTW |
| 2725 | DVYSGtPTKVFFRKNWLRLTW |
| 2726 | DYSPYFKtIFFRKNWLRLTW |
| 2727 | EAsSPVPYLFFRKNWLRLTW |
| 2728 | EASsPVPYLFFRKNWLRLTW |
| 2729 | EEAPQtPVAFFFRKNWLRLTW |
| 2730 | EEDtYEKVFFFRKNWLRLTW |
| 2731 | EEFsPRQAQmFFFRKNWLRLTW |
| 2732 | EEFsPRQAQMFFFRKNWLRLTW |
| 2733 | EEIsPTKFPGLFFRKNWLRLTW |
| 2734 | EEIsPTKFPGLYFFRKNWLRLTW |
| 2735 | EELsPLALGRFFFRKNWLRLTW |
| 2736 | EELsPSTVLYFFRKNWLRLTW |
| 2737 | EELSPsTVLYFFRKNWLRLTW |
| 2738 | EELSPtAKFFFRKNWLRLTW |
| 2739 | EGPEtGYSLFFRKNWLRLTW |
| 2740 | EHERSIsPLLFFFRKNWLRLTW |
| 2741 | EIVNFsPIARFFRKNWLRLTW |
| 2742 | ERLKIRGsLFFRKNWLRLTW |
| 2743 | ERVDSLVsLFFRKNWLRLTW |
| 2744 | ESFSDyPPLGRFAFFRKNWLRLTW |
| 2745 | ESLsPIGDmKVFFRKNWLRLTW |
| 2746 | ESLsPIGDMKVFFRKNWLRLTW |
| 2747 | ESVYKASLsLFFRKNWLRLTW |
| 2748 | ETRRPsYLEWFFRKNWLRLTW |
| 2749 | EVIRKGsITEYFFRKNWLRLTW |
| 2750 | EVIsQHLVSYFFRKNWLRLTW |
| 2751 | EVIsVLQKYFFRKNWLRLTW |
| 2752 | EVLERKIsMFFRKNWLRLTW |
| 2753 | FAFPGStNSLFFRKNWLRLTW |
| 2754 | FAFPGSTNsLFFRKNWLRLTW |
| 2755 | FASPtSPPVLFFRKNWLRLTW |
| 2756 | FASPTsPPVLFFRKNWLRLTW |
| 2757 | FATIKSAsLFFRKNWLRLTW |
| 2758 | FATIRTAsLFFRKNWLRLTW |
| 2759 | FAVsPIPGRGGVLFFRKNWLRLTW |
| 2760 | FAwsPLAGEKFFFRKNWLRLTW |
| 2761 | FAWsPLAGEKFFFRKNWLRLTW |
| 2762 | FAYsPGGAHGmLFFRKNWLRLTW |
| 2763 | FFFtARTSFFFRKNWLRLTW |
| 2764 | FGGQRLtLFFRKNWLRLTW |
| 2765 | FHGISTVsLFFRKNWLRLTW |
| 2766 | FHVtPLKLFFRKNWLRLTW |
| 2767 | FIVsPVPESRLFFRKNWLRLTW |
| 2768 | FKVsPLTFGRFFRKNWLRLTW |
| 2769 | FLDsAYFRLFFRKNWLRLTW |
| 2770 | FLDsGTIRGVFFRKNWLRLTW |
| 2771 | FLFsPPEVTGRFFRKNWLRLTW |
| 2772 | FLKPsTSGDSLFFRKNWLRLTW |
| 2773 | FLKPSTsGDSLFFRKNWLRLTW |
| 2774 | FLKPSTSGDsLFFRKNWLRLTW |
| 2775 | FLNEKARLsYFFRKNWLRLTW |
| 2776 | FLsRSIPSLFFRKNWLRLTW |
| 2777 | FPDNsDVSSIGRLFFRKNWLRLTW |
| 2778 | FPDNSDVSsIGRLFFRKNWLRLTW |
| 2779 | FPLMRSKsLFFRKNWLRLTW |
| 2780 | FPLsPTKLSQYFFRKNWLRLTW |
| 2781 | FPSMPsPRLFFRKNWLRLTW |
| 2782 | FQYSKSPsLFFRKNWLRLTW |
| 2783 | FRFsPMGVDHMFFRKNWLRLTW |
| 2784 | FRPPPLtPEDVGFFFRKNWLRLTW |
| 2785 | FRRPDIQYPDAtDEFFRKNWLRLTW |
| 2786 | FRRsDDMFTFFFRKNWLRLTW |
| 2787 | FRYSGKtEYFFRKNWLRLTW |
| 2788 | FSFKKsFKLFFRKNWLRLTW |
| 2789 | FSFsPGAGAFRFFRKNWLRLTW |
| 2790 | FSLRYsPGmDAYFFRKNWLRLTW |
| 2791 | FSLRYsPGMDAYFFRKNWLRLTW |
| 2792 | FSRPSMsPTPLDRFFRKNWLRLTW |
| 2793 | FSVDsPRIYFFRKNWLRLTW |
| 2794 | FTIFRTIsVFFRKNWLRLTW |
| 2795 | FtPPVVKRFFRKNWLRLTW |
| 2796 | FVLsPIKEPAFFRKNWLRLTW |
| 2797 | FVRsPGTGAFFFRKNWLRLTW |
| 2798 | FVtTPTAELFFRKNWLRLTW |
| 2799 | FVTtPTAELFFRKNWLRLTW |
| 2800 | FVTTPtAELFFRKNWLRLTW |
| 2801 | FYYsPSGKKFFFRKNWLRLTW |
| 2802 | GALsRYLFRFFRKNWLRLTW |
| 2803 | GEDPLsPRALFFRKNWLRLTW |
| 2804 | GELEsIGELFFFRKNWLRLTW |
| 2805 | GEmsPQRFFFFRKNWLRLTW |
| 2806 | GEMsPQRFFFFRKNWLRLTW |
| 2807 | GEmsPQRFFFFFRKNWLRLTW |
| 2808 | GENKsPLLLFFRKNWLRLTW |
| 2809 | GEPRAPtPPSGTEVTLFFRKNWLRLT |
| | W |
| 2810 | GEPsPPHDILFFRKNWLRLTW |
| 2811 | GEtSPRTKITWFFRKNWLRLTW |
| 2812 | GETsPRTKITWFFRKNWLRLTW |
| 2813 | GEwsASLPHRFFFRKNWLRLTW |
| 2814 | GEwSAsLPHRFFFRKNWLRLTW |
| 2815 | GEWsASLPHRFFFRKNWLRLTW |
| 2816 | GEYsPGTALPFFRKNWLRLTW |
| 2817 | GGLTsPGLSYFFRKNWLRLTW |
| 2818 | GGSISVQVNSIKFDsEFFRKNWLRLT |
| | W |
| 2819 | GHGsPFPSLFFRKNWLRLTW |
| 2820 | GIFPGtPLKKFFRKNWLRLTW |
| 2821 | GIISsPLTGKFFRKNWLRLTW |
| 2822 | GIISSPLtGKFFRKNWLRLTW |
| 2823 | GImsPLAKKFFRKNWLRLTW |
| 2824 | GLFsPIRSSAFFFRKNWLRLTW |
| 2825 | GLLsLSALGSQAHLFFRKNWLRLTW |
| 2826 | GLPGGGsPTTFLFFRKNWLRLTW |
| 2827 | GLSsLSIHLFFRKNWLRLTW |
| 2828 | GLTsPGLSYSLFFRKNWLRLTW |
| 2829 | GLtVSIPGLFFRKNWLRLTW |
| 2830 | GMATLsLLLKFFRKNWLRLTW |
| 2831 | GPGHHHKPGLGEGtPFFRKNWLRLTW |
| 2832 | GPLSRVKsLFFRKNWLRLTW |
| 2833 | GPLVRQIsLFFRKNWLRLTW |
| 2834 | GPRAPSPtKPLFFRKNWLRLTW |
| 2835 | GPRsASLLFFRKNWLRLTW |
| 2836 | GPRSFtPLSIFFRKNWLRLTW |
| 2837 | GPRsPKAWLFFRKNWLRLTW |
| 2838 | GPRtPTQPLLFFRKNWLRLTW |
| 2839 | GRNsLSSLPTYFFRKNWLRLTW |
| 2840 | GRQSPsFKLFFRKNWLRLTW |
| 2841 | GSFAsPGRLFFFRKNWLRLTW |
| 2842 | GsFRGFPALFFRKNWLRLTW |
| 2843 | GSKsPDPYRLFFRKNWLRLTW |
| 2844 | GSRsLYNLRFFRKNWLRLTW |
| 2845 | GTFPKALsIFFRKNWLRLTW |
| 2846 | GtPLSQATIHQYFFRKNWLRLTW |
| 2847 | GTVtPPPRLVKFFRKNWLRLTW |
| 2848 | GTYVPSsPTRLAYFFRKNWLRLTW |
| 2849 | GVIKsPSWQRFFRKNWLRLTW |
| 2850 | GVIsPQELLKFFRKNWLRLTW |
| 2851 | GVIsPQELLKKFFRKNWLRLTW |
| 2852 | GVLsPDTISSKFFRKNWLRLTW |
| 2853 | GVmtPLIKRFFRKNWLRLTW |
| 2854 | GVMtPLIKRFFRKNWLRLTW |
| 2855 | HEFsSPSHLLFFRKNWLRLTW |
| 2856 | HEFSsPSHLLFFRKNWLRLTW |
| 2857 | HELsDITELFFRKNWLRLTW |
| 2858 | HERSIsPLLFFRKNWLRLTW |
| 2859 | HFDsPPHLLFFRKNWLRLTW |
| 2860 | HHHKPGLGEGtPFFRKNWLRLTW |
| 2861 | HHPGLGEGtPFFRKNWLRLTW |
| 2862 | HKIsDYFEYFFRKNWLRLTW |
| 2863 | HLLEtTPKSEFFRKNWLRLTW |
| 2864 | HLLETtPKSEFFRKNWLRLTW |
| 2865 | HLLSPtKGIFFRKNWLRLTW |
| 2866 | HLNsLDVQLFFRKNWLRLTW |
| 2867 | HLPsPPLTQEVFFRKNWLRLTW |
| 2868 | HLSsFTMKLFFRKNWLRLTW |
| 2869 | HPIsPYEHLFFRKNWLRLTW |
| 2870 | HPIsPYEHLLFFRKNWLRLTW |
| 2871 | HPIsSEELLFFRKNWLRLTW |
| 2872 | HPISsEELLFFRKNWLRLTW |
| 2873 | HPIsSEELLSLKYFFRKNWLRLTW |
| 2874 | HPISsEELLSLKYFFRKNWLRLTW |
| 2875 | HPRPVPDsPVSVTRLFFRKNWLRLTW |
| 2876 | HPRsPNVLSVALFFRKNWLRLTW |
| 2877 | HPsLSAPALFFRKNWLRLTW |
| 2878 | HPSLsAPALFFRKNWLRLTW |
| 2879 | HPTLQAPsLFFRKNWLRLTW |
| 2880 | HPYRNsDPVIFFRKNWLRLTW |
| 2881 | HQFsLKENwFFRKNWLRLTW |
| 2882 | HQGKFLQtFFFRKNWLRLTW |
| 2883 | HRAsKVLFLFFRKNWLRLTW |
| 2884 | HRDsFSRmSLFFRKNWLRLTW |
| 2885 | HRDsFSRMSLFFRKNWLRLTW |
| 2886 | HRNsmKVFLFFRKNWLRLTW |
| 2887 | HRVsVILKLFFRKNWLRLTW |
| 2888 | HSDKRRPPsAELYFFRKNWLRLTW |
| 2889 | HSLsLDDIRLYFFRKNWLRLTW |
| 2890 | HSVsPDPVLFFRKNWLRLTW |
| 2891 | HTIsPLDLAFFRKNWLRLTW |
| 2892 | HTIsPLDLAKFFRKNWLRLTW |
| 2893 | HTIsPLDLAKLFFRKNWLRLTW |
| 2894 | HTIsPSFQLFFRKNWLRLTW |
| 2895 | HTISPsFQLFFRKNWLRLTW |
| 2896 | HVSLITPtKRFFRKNWLRLTW |
| 2897 | HYFsPFRPYFFRKNWLRLTW |
| 2898 | HYsSRLGSAIFFFRKNWLRLTW |
| 2899 | HYSsRLGSAIFFFRKNWLRLTW |
| 2900 | HYSSRLGsAIFFFRKNWLRLTW |
| 2901 | IAATKsLSVFFRKNWLRLTW |
| 2902 | IEIERILsVFFRKNWLRLTW |
| 2903 | IFDLQKTsLFFRKNWLRLTW |
| 2904 | IIQsPSSTGLLKFFRKNWLRLTW |
| 2905 | ILGPPPPsFHLFFRKNWLRLTW |
| 2906 | ILLtDLIIFFRKNWLRLTW |
| 2907 | IMKNLQAHyEFFRKNWLRLTW |
| 2908 | IPHQRSsLFFRKNWLRLTW |
| 2909 | IPKsKFLALFFRKNWLRLTW |
| 2910 | IPMtPTSSFFFRKNWLRLTW |
| 2911 | IPMTPtSSFFFRKNWLRLTW |
| 2912 | IPRPLsLIGFFRKNWLRLTW |
| 2913 | IPRsFRHLSFFFRKNWLRLTW |
| 2914 | IPsmSHVHLFFRKNWLRLTW |
| 2915 | IPsMSHVHLFFRKNWLRLTW |
| 2916 | IPsPLQPEmFFRKNWLRLTW |
| 2917 | IPsPLQPEMFFRKNWLRLTW |
| 2918 | IPVSKPLsLFFRKNWLRLTW |
| 2919 | IPVsRDWELFFRKNWLRLTW |
| 2920 | IRFGRKPsLFFRKNWLRLTW |
| 2921 | IRPsVLGPLFFRKNWLRLTW |
| 2922 | IRRsYFEVFFFRKNWLRLTW |
| 2923 | IRYSGHsLFFRKNWLRLTW |
| 2924 | ISKKLsFLSWFFRKNWLRLTW |
| 2925 | ISLDKLVsIFFRKNWLRLTW |
| 2926 | IsSLTTLSIFFRKNWLRLTW |
| 2927 | ISsLTTLSIFFRKNWLRLTW |
| 2928 | IssSmHSLYFFRKNWLRLTW |
| 2929 | ISsSMHSLYFFRKNWLRLTW |
| 2930 | ISSsmHSLYFFRKNWLRLTW |
| 2931 | ITItPPEKYFFRKNWLRLTW |
| 2932 | ITLLsPKHKYFFRKNWLRLTW |
| 2933 | ItPPSSEKLVSVmFFRKNWLRLTW |
| 2934 | ItPPSSEKLVSVMFFRKNWLRLTW |
| 2935 | ITTsPITVRFFRKNWLRLTW |
| 2936 | ITTsPITVRKFFRKNWLRLTW |
| 2937 | ITYsPKLERFFRKNWLRLTW |
| 2938 | IVLPLsLQRFFRKNWLRLTW |
| 2939 | IVsSLRLAYFFRKNWLRLTW |
| 2940 | IVSsLRLAYFFRKNWLRLTW |
| 2941 | IYDsVKVYFFFRKNWLRLTW |
| 2942 | IYRSQsPHYFFFRKNWLRLTW |
| 2943 | KAFsESGSNLHALFFRKNWLRLTW |
| 2944 | KAFsPVRSVRFFRKNWLRLTW |
| 2945 | KAFsPVRSVRKFFRKNWLRLTW |
| 2946 | KAItPPQQPYFFRKNWLRLTW |
| 2947 | KASsPGHPAFFFRKNWLRLTW |
| 2948 | KAVsFHLVHFFRKNWLRLTW |
| 2949 | KAVsLFLFFRKNWLRLTW |
| 2950 | KAYtPVVVTQWFFRKNWLRLTW |
| 2951 | KEDsFLQRYFFRKNWLRLTW |
| 2952 | KEmSPtRQLFFRKNWLRLTW |
| 2953 | KEsEVFYELFFRKNWLRLTW |
| 2954 | KEsTLHLVLFFRKNWLRLTW |
| 2955 | KEStLHLVLFFRKNWLRLTW |
| 2956 | KFLsPAQYLYFFRKNWLRLTW |
| 2957 | KFRDLsPPRYFFRKNWLRLTW |
| 2958 | KFsLRAAEFFFRKNWLRLTW |
| 2959 | KGFsGTFQLFFRKNWLRLTW |
| 2960 | KIFERATsFFFRKNWLRLTW |
| 2961 | KIFsKQQGKAFQRFFRKNWLRLTW |
| 2962 | KIIsIFSGFFRKNWLRLTW |
| 2963 | KIIsIFSGTEKFFRKNWLRLTW |
| 2964 | KIKsLEEIYLFFRKNWLRLTW |
| 2965 | KINsLAHLRFFRKNWLRLTW |
| 2966 | KISsFTSLKFFRKNWLRLTW |
| 2967 | KISSFtSLKFFRKNWLRLTW |
| 2968 | KISSFTsLKFFRKNWLRLTW |
| 2969 | KISsLEIKLFFRKNWLRLTW |
| 2970 | KKLsLLNGGLFFRKNWLRLTW |
| 2971 | KLEGPDVsLFFRKNWLRLTW |
| 2972 | KLFHGsLEELFFRKNWLRLTW |
| 2973 | KLFPGsPATYFFRKNWLRLTW |
| 2974 | KLHsLIGLGIFFRKNWLRLTW |
| 2975 | KLIDIVSsQKVFFRKNWLRLTW |
| 2976 | KLKsFTYEYFFRKNWLRLTW |
| 2977 | KLLDFGsLSNLFFRKNWLRLTW |
| 2978 | KLLEGEESRIsLFFRKNWLRLTW |
| 2979 | KLLsPILARYFFRKNWLRLTW |
| 2980 | KLLsTALHVFFRKNWLRLTW |
| 2981 | KLLsYIQRLFFRKNWLRLTW |
| 2982 | KLMsDVEDVSLFFRKNWLRLTW |
| 2983 | KLMsLGDIRLFFRKNWLRLTW |
| 2984 | KLmsPKADVKLFFRKNWLRLTW |
| 2985 | KLMsPVLKQHLFFRKNWLRLTW |
| 2986 | KLQEFsKEEFFRKNWLRLTW |
| 2987 | KLRIQtDGDKYFFRKNWLRLTW |
| 2988 | KLSsGLLPKLFFRKNWLRLTW |
| 2989 | KLwtLVSEQTRVFFRKNWLRLTW |
| 2990 | KLWtLVSEQTRVFFRKNWLRLTW |
| 2991 | KLYRPGsVAYFFRKNWLRLTW |
| 2992 | KLYsISSQVFFRKNWLRLTW |
| 2993 | KLYsPTSKALFFRKNWLRLTW |
| 2994 | KLYSPtSKALFFRKNWLRLTW |
| 2995 | KLYTyIQSRFFRKNWLRLTW |
| 2996 | KLYTyIQSRFFFRKNWLRLTW |
| 2997 | KmDsFLDMQLFFRKNWLRLTW |
| 2998 | KMDsFLDmQLFFRKNWLRLTW |
| 2999 | KmsSYAFFVFFRKNWLRLTW |
| 3000 | KmSsYAFFVFFRKNWLRLTW |
| 3001 | KMsSYAFFVFFRKNWLRLTW |
| 3002 | KMSsYAFFVFFRKNWLRLTW |
| 3003 | KmsSYAFFVQTFFRKNWLRLTW |
| 3004 | KmSsYAFFVQTFFRKNWLRLTW |
| 3005 | KMsSYAFFVQTFFRKNWLRLTW |
| 3006 | KMSsYAFFVQTFFRKNWLRLTW |
| 3007 | KPAsPARRLDLFFRKNWLRLTW |
| 3008 | KPDKTLRFsLFFRKNWLRLTW |
| 3009 | KPHsPVTGLYLFFRKNWLRLTW |
| 3010 | KPLsRVTSLFFRKNWLRLTW |
| 3011 | KPPsPGTVLFFRKNWLRLTW |
| 3012 | KPPSPGtVLFFRKNWLRLTW |
| 3013 | KPRPLsmDLFFRKNWLRLTW |
| 3014 | KPRSIsFPSAFFRKNWLRLTW |
| 3015 | KPSSLRRVtIFFRKNWLRLTW |
| 3016 | KPSsPRGSLLLFFRKNWLRLTW |
| 3017 | KQKsLTNLSFFFRKNWLRLTW |
| 3018 | KQKSLtNLSFFFRKNWLRLTW |
| 3019 | KRAsALLNLFFRKNWLRLTW |
| 3020 | KRAsYELEFFFRKNWLRLTW |
| 3021 | KRDsFIGTPYFFRKNWLRLTW |
| 3022 | KRFsLDFNLFFRKNWLRLTW |
| 3023 | KRIsIFLSMFFRKNWLRLTW |
| 3024 | KRIsISTSGGSFFFRKNWLRLTW |
| 3025 | KRLGsLVDEFFFRKNWLRLTW |
| 3026 | KRLsVELTSSLFFRKNWLRLTW |
| 3027 | KRLsVELTSSLFFFRKNWLRLTW |
| 3028 | KRLsVERIYQKFFRKNWLRLTW |
| 3029 | KRMsFVMEYFFRKNWLRLTW |
| 3030 | KRNsDLLLLFFRKNWLRLTW |
| 3031 | KRPsSEDFVFFFRKNWLRLTW |
| 3032 | KRPsSEDFVFLFFRKNWLRLTW |
| 3033 | KRPSsEDFVFLFFRKNWLRLTW |
| 3034 | KRRtGALVLFFRKNWLRLTW |
| 3035 | KRSsISQLLFFRKNWLRLTW |
| 3036 | KRVsTFQEFFFRKNWLRLTW |
| 3037 | KRVtWIVEFFFRKNWLRLTW |
| 3038 | KRYLFRsFFFRKNWLRLTW |
| 3039 | KRYsRSLTIFFRKNWLRLTW |
| 3040 | KSAsFAFEFFFRKNWLRLTW |
| 3041 | KSDGsFIGYFFRKNWLRLTW |
| 3042 | KSFsAPATQAYFFRKNWLRLTW |
| 3043 | KSGELLAtwFFRKNWLRLTW |
| 3044 | KSGEPLStWFFRKNWLRLTW |
| 3045 | KSKsIEITFFFRKNWLRLTW |
| 3046 | KsLPSDQVmLFFRKNWLRLTW |
| 3047 | KsLPSDQVMLFFRKNWLRLTW |
| 3048 | KSLsIEIGHEVFFRKNWLRLTW |
| 3049 | KSLSPsLLGYFFRKNWLRLTW |
| 3050 | KSSEEKRLSIsKFFFRKNWLRLTW |
| 3051 | KSSsLPRAFFFRKNWLRLTW |
| 3052 | KSVtPTKEFLFFRKNWLRLTW |
| 3053 | KTDsDSDLQLYFFRKNWLRLTW |
| 3054 | KTIsESDLNHSFFFRKNWLRLTW |
| 3055 | KTIsPKSTVYFFRKNWLRLTW |
| 3056 | KTKsMFFFLFFRKNWLRLTW |
| 3057 | KTLsLVKELFFRKNWLRLTW |
| 3058 | KTmsGTFLLFFRKNWLRLTW |
| 3059 | KTmSGtFLLFFRKNWLRLTW |
| 3060 | KTMSGtFLLFFRKNWLRLTW |
| 3061 | KTmsGTFLLRFFFRKNWLRLTW |
| 3062 | KTMsGTFLLRFFFRKNWLRLTW |
| 3063 | KtMSPSQMIMFFRKNWLRLTW |
| 3064 | KTQRVsLLFFFRKNWLRLTW |
| 3065 | KtRSLSVEIVYFFRKNWLRLTW |
| 3066 | KTRsLSVEIVYFFRKNWLRLTW |
| 3067 | KTVsPPIRKGWFFRKNWLRLTW |
| 3068 | KTVsSTKLVSFFFRKNWLRLTW |
| 3069 | KVDGPRSPsYFFRKNWLRLTW |
| 3070 | KVEsPPLEEwFFRKNWLRLTW |
| 3071 | KVFsLPTQLFFRKNWLRLTW |
| 3072 | KVFsPVIRSSFFFRKNWLRLTW |
| 3073 | KVGsFKFIYVFFRKNWLRLTW |
| 3074 | KVLswPFLmFFRKNWLRLTW |
| 3075 | KVLswPFLMFFRKNWLRLTW |
| 3076 | KWPsKRRIPVFFRKNWLRLTW |
| 3077 | KYRsVISDIFFFRKNWLRLTW |
| 3078 | LAFPsPEKLLRFFRKNWLRLTW |
| 3079 | LAsDRCSIHLFFRKNWLRLTW |
| 3080 | LEIKEsILSLFFRKNWLRLTW |
| 3081 | LEIsPDNSLFFRKNWLRLTW |
| 3082 | LEIsVGKSVFFRKNWLRLTW |
| 3083 | LEsPTTPLLFFRKNWLRLTW |
| 3084 | LESPtTPLLFFRKNWLRLTW |
| 3085 | LESPTtPLLFFRKNWLRLTW |
| 3086 | LGFEVKsKmVFFRKNWLRLTW |
| 3087 | LGFEVKsKMVFFRKNWLRLTW |
| 3088 | LGmEVLsGVFFRKNWLRLTW |
| 3089 | LGMEVLsGVFFRKNWLRLTW |
| 3090 | LIPDHtIRAFFRKNWLRLTW |
| 3091 | LLDIIRsLFFRKNWLRLTW |
| 3092 | LLDPRSYHtYFFRKNWLRLTW |
| 3093 | LLsPKHKYFFRKNWLRLTW |
| 3094 | LPAsPRARLSAFFRKNWLRLTW |
| 3095 | LPAsPSVSLFFRKNWLRLTW |
| 3096 | LPASPsVSLFFRKNWLRLTW |
| 3097 | LPDPGsPRLFFRKNWLRLTW |
| 3098 | LPEsPRLTLFFRKNWLRLTW |
| 3099 | LPFSGPREPsLFFRKNWLRLTW |
| 3100 | LPFSsSPSRSAFFRKNWLRLTW |
| 3101 | LPFSSsPSRSAFFRKNWLRLTW |
| 3102 | LPLsSSHLNVYFFRKNWLRLTW |
| 3103 | LPLSsSHLNVYFFRKNWLRLTW |
| 3104 | LPLSSsHLNVYFFRKNWLRLTW |
| 3105 | LPPVsPLKAAFFRKNWLRLTW |
| 3106 | LPRGLsPARQLFFRKNWLRLTW |
| 3107 | LPRGSSPsVLFFRKNWLRLTW |
| 3108 | LPRPLsPTKLFFRKNWLRLTW |
| 3109 | LPRPLSPtKLFFRKNWLRLTW |
| 3110 | LPRRLsDSPVFFFRKNWLRLTW |
| 3111 | LPRRLSDsPVFFFRKNWLRLTW |
| 3112 | LPRsPPLKVLFFRKNWLRLTW |
| 3113 | LPRsSRGLLFFRKNWLRLTW |
| 3114 | LPRSsRGLLFFRKNWLRLTW |
| 3115 | LPRSSsmAAGLFFRKNWLRLTW |
| 3116 | LPSARPLsLFFRKNWLRLTW |
| 3117 | LPsRLTKcFFRKNWLRLTW |
| 3118 | LPTsPLAmFFRKNWLRLTW |
| 3119 | LPtSPLAmEYFFRKNWLRLTW |
| 3120 | LPtSPLAMEYFFRKNWLRLTW |
| 3121 | LPTsPLAmEYFFRKNWLRLTW |
| 3122 | LPTsPLAMEYFFRKNWLRLTW |
| 3123 | LPVsPGHRKTFFRKNWLRLTW |
| 3124 | LPYPVsPKQKYFFRKNWLRLTW |
| 3125 | LQHSFsFAGFFFRKNWLRLTW |
| 3126 | LQIsPVSSYFFRKNWLRLTW |
| 3127 | LSKsSATLwFFRKNWLRLTW |
| 3128 | LSPtKLPSIFFRKNWLRLTW |
| 3129 | LSRTFKsLFFFRKNWLRLTW |
| 3130 | LsSSVIRELFFRKNWLRLTW |
| 3131 | LSsSVIRELFFRKNWLRLTW |
| 3132 | LTAsQILSRFFRKNWLRLTW |
| 3133 | LTDPsSPTISSYFFRKNWLRLTW |
| 3134 | LTDPSSPtISSYFFRKNWLRLTW |
| 3135 | LTKtLIKLFFRKNWLRLTW |
| 3136 | LVAsPRLEKFFRKNWLRLTW |
| 3137 | LVREPGsQAcLFFRKNWLRLTW |
| 3138 | mIIsPERLDPFFFRKNWLRLTW |
| 3139 | MIIsPERLDPFFFRKNWLRLTW |
| 3140 | MLPsPNEKLFFRKNWLRLTW |
| 3141 | MPFPAHLtYFFRKNWLRLTW |
| 3142 | mPHsPTLRVFFRKNWLRLTW |
| 3143 | mPHSPtLRVFFRKNWLRLTW |
| 3144 | MPHsPTLRVFFRKNWLRLTW |
| 3145 | MPHSPtLRVFFRKNWLRLTW |
| 3146 | MPKFRMPsLFFRKNWLRLTW |
| 3147 | MPQDLRsPAFFRKNWLRLTW |
| 3148 | mPREPsATRLFFRKNWLRLTW |
| 3149 | mPRQPsATRLFFRKNWLRLTW |
| 3150 | mPsPATLSHSLFFRKNWLRLTW |
| 3151 | MPsPATLSHSLFFRKNWLRLTW |
| 3152 | MPsPFRSSALFFRKNWLRLTW |
| 3153 | mPsPGGRITLFFRKNWLRLTW |
| 3154 | MPsPGGRITLFFRKNWLRLTW |
| 3155 | MPsPIMHPLILFFRKNWLRLTW |
| 3156 | MPsPLKGQHTLFFRKNWLRLTW |
| 3157 | MPsPSTLKKELFFRKNWLRLTW |
| 3158 | mPsPVSPKLFFRKNWLRLTW |
| 3159 | mPSPVsPKLFFRKNWLRLTW |
| 3160 | MPsPVSPKLFFRKNWLRLTW |
| 3161 | MPSPVsPKLFFRKNWLRLTW |
| 3162 | MPtSPGVDLFFRKNWLRLTW |
| 3163 | MPTsPGVDLFFRKNWLRLTW |
| 3164 | mRLsRELQLFFRKNWLRLTW |
| 3165 | MSKLINHtFFRKNWLRLTW |
| 3166 | mTKSsPLKIFFRKNWLRLTW |
| 3167 | NAIsLPTIFFRKNWLRLTW |
| 3168 | NAVsPSSGPSLFFRKNWLRLTW |
| 3169 | NAWsPVMRARFFRKNWLRLTW |
| 3170 | NHVtPPNVSLFFRKNWLRLTW |
| 3171 | NIPsFIVRLFFRKNWLRLTW |
| 3172 | NLLsPDGKmISVFFRKNWLRLTW |
| 3173 | NmDsPGPMLFFRKNWLRLTW |
| 3174 | NMDsPGPmLFFRKNWLRLTW |
| 3175 | NPIHsPSYPLFFRKNWLRLTW |
| 3176 | NPIHSPsYPLFFRKNWLRLTW |
| 3177 | NPsSPEFFmFFRKNWLRLTW |
| 3178 | NPsSPEFFMFFRKNWLRLTW |
| 3179 | NPSsPEFFmFFRKNWLRLTW |
| 3180 | NPSsPEFFMFFRKNWLRLTW |
| 3181 | NQGsPFKSALFFRKNWLRLTW |
| 3182 | NREsFQIFLFFRKNWLRLTW |
| 3183 | NRFsGGFGARDYFFRKNWLRLTW |
| 3184 | NRFsPKASLFFRKNWLRLTW |
| 3185 | NRHsLPFSLFFRKNWLRLTW |
| 3186 | NRHsLVEKLFFRKNWLRLTW |
| 3187 | NRLsLLVQKFFRKNWLRLTW |
| 3188 | NRMsRRIVLFFRKNWLRLTW |
| 3189 | NRSLHINNIsPGNTISFFRKNWLRLT |
| | W |
| 3190 | NRSsPVHIIFFRKNWLRLTW |
| 3191 | NSISSVVsRFFRKNWLRLTW |
| 3192 | NSLsPRSSLFFRKNWLRLTW |
| 3193 | NSVsPSESLFFRKNWLRLTW |
| 3194 | NVLsPLPSQFFRKNWLRLTW |
| 3195 | NVLsPLPSQAMFFRKNWLRLTW |
| 3196 | NVMKRKFsLFFRKNWLRLTW |
| 3197 | PEFPLsPPKKFFRKNWLRLTW |
| 3198 | PEVsPRPALFFRKNWLRLTW |
| 3199 | PIFSRLsIFFRKNWLRLTW |
| 3200 | PVSKPLsLFFRKNWLRLTW |
| 3201 | QEAsPRPLLFFRKNWLRLTW |
| 3202 | QLMtLENKLFFRKNWLRLTW |
| 3203 | QLPsPTATSQLFFRKNWLRLTW |
| 3204 | QPRNSLPAsPAHQLFFRKNWLRLTW |
| 3205 | QPRTPsPLVLFFRKNWLRLTW |
| 3206 | QRVPsYDSFFFRKNWLRLTW |
| 3207 | QSIsFSGLPSGRFFRKNWLRLTW |
| 3208 | QSSsWTRVFFFRKNWLRLTW |
| 3209 | QTIsPLSTYFFRKNWLRLTW |
| 3210 | QTPDFtPTKYFFRKNWLRLTW |
| 3211 | QTPsPRLALFFRKNWLRLTW |
| 3212 | QTRRPsYLEWFFRKNWLRLTW |
| 3213 | RAAsIENVLFFRKNWLRLTW |
| 3214 | RAAsSPDGFFwFFRKNWLRLTW |
| 3215 | RASsPDGFFwFFRKNWLRLTW |
| 3216 | RAAtPLPSLFFRKNWLRLTW |
| 3217 | RAAtPTLTTFFFRKNWLRLTW |
| 3218 | RAATPtLTTFFFRKNWLRLTW |
| 3219 | RAGsFSRFYFFRKNWLRLTW |
| 3220 | RAHtPTPGIYmFFRKNWLRLTW |
| 3221 | RAHtPTPGIYMFFRKNWLRLTW |
| 3222 | RAHTPtPGIYMFFRKNWLRLTW |
| 3223 | RALsHADLFFFRKNWLRLTW |
| 3224 | RALsLTRALFFRKNWLRLTW |
| 3225 | RANsFVGTAQYFFRKNWLRLTW |
| 3226 | RAPsYRTLELFFRKNWLRLTW |
| 3227 | RARsPVLWGWFFRKNWLRLTW |
| 3228 | RAsSLNFLNKFFRKNWLRLTW |
| 3229 | RASsLNFLNKFFRKNWLRLTW |
| 3230 | RAtSNVFAmFFRKNWLRLTW |
| 3231 | RAtSNVFAMFFRKNWLRLTW |
| 3232 | RATsNVFAmFFRKNWLRLTW |
| 3233 | RATsNVFAMFFRKNWLRLTW |
| 3234 | RAtSNVFAmFFFRKNWLRLTW |
| 3235 | RAtSNVFAMFFFRKNWLRLTW |
| 3236 | RATsNVFAmFFFRKNWLRLTW |
| 3237 | RATsNVFAMFFFRKNWLRLTW |
| 3238 | RATsPLVSLYFFRKNWLRLTW |
| 3239 | RAVsPFAKIFFRKNWLRLTW |
| 3240 | RAVsPHFDDmFFRKNWLRLTW |
| 3241 | RAVsPHFDDMFFRKNWLRLTW |
| 3242 | RAYsPLHGGSGSYFFRKNWLRLTW |
| 3243 | REAPsPLmFFRKNWLRLTW |
| 3244 | REAPsPLMFFRKNWLRLTW |
| 3245 | REAsIELPSmFFRKNWLRLTW |
| 3246 | REDsLEFSLFFRKNWLRLTW |
| 3247 | REDSLEFsLFFRKNWLRLTW |
| 3248 | REFSGPStPTGTLFFRKNWLRLTW |
| 3249 | REFSGPSTPtGTLFFRKNWLRLTW |
| 3250 | REImGtPEYLFFRKNWLRLTW |
| 3251 | RELsAPARLYFFRKNWLRLTW |
| 3252 | RELsGTIKEILFFRKNWLRLTW |
| 3253 | RELsPSSLKmFFRKNWLRLTW |
| 3254 | RELsPVSFQYFFRKNWLRLTW |
| 3255 | REPsESSPLALFFRKNWLRLTW |
| 3256 | REPSESsPLALFFRKNWLRLTW |
| 3257 | REPsPLPELALFFRKNWLRLTW |
| 3258 | REPsPVRYDNLFFRKNWLRLTW |
| 3259 | RERAFsVKFFFRKNWLRLTW |
| 3260 | REsPIPIEIFFRKNWLRLTW |
| 3261 | REsPRPLQLFFRKNWLRLTW |
| 3262 | RESsLGFQLFFRKNWLRLTW |
| 3263 | RETNLDsLPLFFRKNWLRLTW |
| 3264 | RETsMVHELFFRKNWLRLTW |
| 3265 | RETsPNRIGLFFRKNWLRLTW |
| 3266 | REVsPEPIVFFRKNWLRLTW |
| 3267 | RFQsmPVRLFFRKNWLRLTW |
| 3268 | RFQsMPVRLFFRKNWLRLTW |
| 3269 | RHKsDSISLFFRKNWLRLTW |
| 3270 | RHLPsPPTLFFRKNWLRLTW |
| 3271 | RIGsDPLAYFFRKNWLRLTW |
| 3272 | RIIEtPPHRYFFRKNWLRLTW |
| 3273 | RIKLGDyHFYFFRKNWLRLTW |
| 3274 | RILFsPFFHFFRKNWLRLTW |
| 3275 | RILsATTSGIFLFFRKNWLRLTW |
| 3276 | RILsDVTHSAVFFRKNWLRLTW |
| 3277 | RILsGVVTKmFFRKNWLRLTW |
| 3278 | RILsGVVTKMFFRKNWLRLTW |
| 3279 | RILsGVVTKMKMFFRKNWLRLTW |
| 3280 | RIMsPMRTGNTYFFRKNWLRLTW |
| 3281 | RIQsPLNNKLFFRKNWLRLTW |
| 3282 | RIRsIEALLFFRKNWLRLTW |
| 3283 | RItSLIVHVFFRKNWLRLTW |
| 3284 | RITsPVHVSFFFRKNWLRLTW |
| 3285 | RIVsPKNSDLKFFRKNWLRLTW |
| 3286 | RIWsPTIGRFFRKNWLRLTW |
| 3287 | RIWSPtIGRFFRKNWLRLTW |
| 3288 | RIYsRIDRLEAFFRKNWLRLTW |
| 3289 | RKFsAPGQLFFRKNWLRLTW |
| 3290 | RKLsFTESLFFRKNWLRLTW |
| 3291 | RKLSFtESLFFRKNWLRLTW |
| 3292 | RKLsGDQITLFFRKNWLRLTW |
| 3293 | RKLsVALAFFFRKNWLRLTW |
| 3294 | RKLsVLLLLFFRKNWLRLTW |
| 3295 | RKNsFVmEYFFRKNWLRLTW |
| 3296 | RKNsFVMEYFFRKNWLRLTW |
| 3297 | RKNsLISSLFFRKNWLRLTW |
| 3298 | RKSsIIIRmFFRKNWLRLTW |
| 3299 | RLAsLFSSLFFRKNWLRLTW |
| 3300 | RLAsLMNLGMFFRKNWLRLTW |
| 3301 | RLAsYLEKVFFRKNWLRLTW |
| 3302 | RLDsELKELFFRKNWLRLTW |
| 3303 | RLDsGHVWKLFFRKNWLRLTW |
| 3304 | RLFsKELRcFFRKNWLRLTW |
| 3305 | RLFsKSIETLFFRKNWLRLTW |
| 3306 | RLFsSFLKRFFRKNWLRLTW |
| 3307 | RLIsLSEQNLFFRKNWLRLTW |
| 3308 | RLISLsEQNLFFRKNWLRLTW |
| 3309 | RLIsQIVSSFFRKNWLRLTW |
| 3310 | RLIsQIVSSITAFFRKNWLRLTW |
| 3311 | RLIsVVSHLFFRKNWLRLTW |
| 3312 | RLKsIEERQLLKFFRKNWLRLTW |
| 3313 | RLLQDsVDFSLFFRKNWLRLTW |
| 3314 | RLLQDsVDSLFFRKNWLRLTW |
| 3315 | RLLsAAENFFFRKNWLRLTW |
| 3316 | RLLsEKILGLFFRKNWLRLTW |
| 3317 | RLLsIKEAFRLFFRKNWLRLTW |
| 3318 | RLLsVNIRVFFRKNWLRLTW |
| 3319 | RLNsPPSSIYKFFRKNWLRLTW |
| 3320 | RLPLPsPALFFRKNWLRLTW |
| 3321 | RLPsDPFTHLFFRKNWLRLTW |
| 3322 | RLPsPTSPFSSLFFRKNWLRLTW |
| 3323 | RLPSsTLKRFFRKNWLRLTW |
| 3324 | RLPtVLLKLFFRKNWLRLTW |
| 3325 | RLQHSFsFFFRKNWLRLTW |
| 3326 | RLRsSVPGVFFRKNWLRLTW |
| 3327 | RLRSsVPGVFFRKNWLRLTW |
| 3328 | RLRsYEDmIFFRKNWLRLTW |
| 3329 | RLsPVPVPRFFRKNWLRLTW |
| 3330 | RLsSVSVTYFFRKNWLRLTW |
| 3331 | RLSsVSVTYFFRKNWLRLTW |
| 3332 | RLWtPPEDYRLFFRKNWLRLTW |
| 3333 | RLYKsEPELFFRKNWLRLTW |
| 3334 | RLYsVSYLLFFRKNWLRLTW |
| 3335 | RmIsHSELRKLFFRKNWLRLTW |
| 3336 | RMIsHSELRKLFFRKNWLRLTW |
| 3337 | RMIsKLEAQVFFRKNWLRLTW |
| 3338 | RmKsPFGSSFFFRKNWLRLTW |
| 3339 | RMKsPFGSSFFFRKNWLRLTW |
| 3340 | RmLsLRDQRLFFRKNWLRLTW |
| 3341 | RmYsFDDVLFFRKNWLRLTW |
| 3342 | RNAsLERVLFFRKNWLRLTW |
| 3343 | RPADSAQLLsLFFRKNWLRLTW |
| 3344 | RPARsVPSIAAFFRKNWLRLTW |
| 3345 | RPAsPALLLFFRKNWLRLTW |
| 3346 | RPAsPLMHIFFRKNWLRLTW |
| 3347 | RPASPsLQLFFRKNWLRLTW |
| 3348 | RPFHGISTVsLPNSLFFRKNWLRLTW |
| 3349 | RPFsKPEIALFFRKNWLRLTW |
| 3350 | RPFsREMDLFFRKNWLRLTW |
| 3351 | RPHLSGRKLsLFFRKNWLRLTW |
| 3352 | RPHtPTPGIFFRKNWLRLTW |
| 3353 | RPHtPTPGIYmFFRKNWLRLTW |
| 3354 | RPHTPtPGIYMFFRKNWLRLTW |
| 3355 | RPIsPRIGAFFRKNWLRLTW |
| 3356 | RPIsVIGGVSFFRKNWLRLTW |
| 3357 | RPItPVYTVFFRKNWLRLTW |
| 3358 | RPItPVYTVAFFRKNWLRLTW |
| 3359 | RPKLHHSLsFFFRKNWLRLTW |
| 3360 | RPKPSSsPVIFFRKNWLRLTW |
| 3361 | RPKPSsSPVIFFFRKNWLRLTW |
| 3362 | RPKPSSsPVIFFFRKNWLRLTW |
| 3363 | RPKPsSSPVIFAFFRKNWLRLTW |
| 3364 | RPKPSsSPVIFAFFRKNWLRLTW |
| 3365 | RPKPSSsPVIFAFFRKNWLRLTW |
| 3366 | RPKsTPELAFFFRKNWLRLTW |
| 3367 | RPKtPPPAPFFRKNWLRLTW |
| 3368 | RPLsKQLSAFFRKNWLRLTW |
| 3369 | RPLsLIQGPPFFRKNWLRLTW |
| 3370 | RPLsPFYLFFRKNWLRLTW |
| 3371 | RPLsPFYLSAFFRKNWLRLTW |
| 3372 | RPLsPGALQLFFRKNWLRLTW |
| 3373 | RPLsPILHIVFFRKNWLRLTW |
| 3374 | RPLsPKPSSPGFFRKNWLRLTW |
| 3375 | RPLsPKPSSPGSVLFFRKNWLRLTW |
| 3376 | RPLSPKPsSPGSVLFFRKNWLRLTW |
| 3377 | RPLsPTRLQPALFFRKNWLRLTW |
| 3378 | RPLtPRTPAFFRKNWLRLTW |
| 3379 | RPNsLVGITSAFFRKNWLRLTW |
| 3380 | RPNSPsPTALFFRKNWLRLTW |
| 3381 | RPNsSALETLFFRKNWLRLTW |
| 3382 | RPNSsALETLFFRKNWLRLTW |
| 3383 | RPPsPGLRGLLFFRKNWLRLTW |
| 3384 | RPQESRsLSPSHLFFRKNWLRLTW |
| 3385 | RPQESRSLsPSHLFFRKNWLRLTW |
| 3386 | RPQsPPAEAVIFFRKNWLRLTW |
| 3387 | RPQtPKEEAQALFFRKNWLRLTW |
| 3388 | RPRAFsHSGVHSLFFRKNWLRLTW |
| 3389 | RPRAFsIASSLFFRKNWLRLTW |
| 3390 | RPREVtVSLFFRKNWLRLTW |
| 3391 | RPRFMsSPVLFFRKNWLRLTW |
| 3392 | RPRFMSsPVLFFRKNWLRLTW |
| 3393 | RPRGPsPLVTmFFRKNWLRLTW |
| 3394 | RPRGPsPLVTMFFRKNWLRLTW |
| 3395 | RPRLQHsFSFFFRKNWLRLTW |
| 3396 | RPRLQHSFsFFFRKNWLRLTW |
| 3397 | RPRPSsVLRTLFFRKNWLRLTW |
| 3398 | RPRPVsPSSLLDTAIFFRKNWLRLTW |
| 3399 | RPRSIsVEEFFFRKNWLRLTW |
| 3400 | RPRSLSsPTVTLFFRKNWLRLTW |
| 3401 | RPRsPNmQDLFFRKNWLRLTW |
| 3402 | RPRsPPEPLRVFFRKNWLRLTW |
| 3403 | RPRSPtGPSNSFFFRKNWLRLTW |
| 3404 | RPRtLRTRLFFRKNWLRLTW |
| 3405 | RPsSAPDLmFFRKNWLRLTW |
| 3406 | RPsSAPDLMFFRKNWLRLTW |
| 3407 | RPSsAPDLmFFRKNWLRLTW |
| 3408 | RPSsAPDLMFFRKNWLRLTW |
| 3409 | RPsSGFYELFFRKNWLRLTW |
| 3410 | RPsSGQDLFFFRKNWLRLTW |
| 3411 | RPSsGQDLFFFRKNWLRLTW |
| 3412 | RPSsLRQYLFFRKNWLRLTW |
| 3413 | RPSsPLIDIKPFFRKNWLRLTW |
| 3414 | RPsSPVHVAFFFRKNWLRLTW |
| 3415 | RPSsPVHVAFFFRKNWLRLTW |
| 3416 | RPSsPVTVTALFFRKNWLRLTW |
| 3417 | RPSsRVALmVLFFRKNWLRLTW |
| 3418 | RPSsRVALMVLFFRKNWLRLTW |
| 3419 | RPStPHTITLFFRKNWLRLTW |
| 3420 | RPsTPTINVLFFRKNWLRLTW |
| 3421 | RPStPTINVLFFRKNWLRLTW |
| 3422 | RPSTPtINVLFFRKNWLRLTW |
| 3423 | RPtSFADELFFRKNWLRLTW |
| 3424 | RPTsISWDGLFFRKNWLRLTW |
| 3425 | RPTSIsWDGLFFRKNWLRLTW |
| 3426 | RPTsPRLLTLFFRKNWLRLTW |
| 3427 | RPVDPRRRsLFFRKNWLRLTW |
| 3428 | RPVsEMFSLFFRKNWLRLTW |
| 3429 | RPVsMDARIQVFFRKNWLRLTW |
| 3430 | RPVsPGKDITAFFRKNWLRLTW |
| 3431 | RPVStDFAQYFFRKNWLRLTW |
| 3432 | RPVtPITNFFFRKNWLRLTW |
| 3433 | RPVtPPRTAFFRKNWLRLTW |
| 3434 | RPwsNSRGLFFRKNWLRLTW |
| 3435 | RPwsPAVSAFFRKNWLRLTW |
| 3436 | RPYPsPGAVLFFRKNWLRLTW |
| 3437 | RQAsIELPSMAFFRKNWLRLTW |
| 3438 | RQAsIELPSmAVFFRKNWLRLTW |
| 3439 | RQAsIELPSmAVAFFRKNWLRLTW |
| 3440 | RQAsIELPSmAVASTFFRKNWLRLTW |
| 3441 | RQAsIELPSMAVASTFFRKNWLRLTW |
| 3442 | RQASLsISVFFRKNWLRLTW |
| 3443 | RQFDEESLEsFFFRKNWLRLTW |
| 3444 | RQFTSSSsIFFRKNWLRLTW |
| 3445 | RQHFsPLSLFFRKNWLRLTW |
| 3446 | RQIQPsPPwSYFFRKNWLRLTW |
| 3447 | RQIQPsPPWSYFFRKNWLRLTW |
| 3448 | RQIsIRGIVGVFFRKNWLRLTW |
| 3449 | RQISISEPQAFFRKNWLRLTW |
| 3450 | RQISISEPQAFFFRKNWLRLTW |
| 3451 | RQISISEPQAFLFFRKNWLRLTW |
| 3452 | RQIsISEPQAFLFFFRKNWLRLTW |
| 3453 | RQIsPEEFEYFFRKNWLRLTW |
| 3454 | RQKsPLFQFAFFRKNWLRLTW |
| 3455 | RQPsEEEIIFFRKNWLRLTW |
| 3456 | RQPsEEEIIKLFFRKNWLRLTW |
| 3457 | RQPsWDPSPVFFRKNWLRLTW |
| 3458 | RQRSLsTSGESLYFFRKNWLRLTW |
| 3459 | RQVsEDPDIDSLFFRKNWLRLTW |
| 3460 | RRAsLSDIGFFFRKNWLRLTW |
| 3461 | RRFRFPsGAELFFRKNWLRLTW |
| 3462 | RRFsDFLGLFFRKNWLRLTW |
| 3463 | RRFSFsGNTLFFRKNWLRLTW |
| 3464 | RRFsGLLNFFRKNWLRLTW |
| 3465 | RRFsGLLNcFFRKNWLRLTW |
| 3466 | RRFsGLLNCFFRKNWLRLTW |
| 3467 | RRFsGLSAELFFRKNWLRLTW |
| 3468 | RRFsLDTDYFFRKNWLRLTW |
| 3469 | RRFsPPRRMLFFRKNWLRLTW |
| 3470 | RRFsVTLRLFFRKNWLRLTW |
| 3471 | RRFtEIYEFFFRKNWLRLTW |
| 3472 | RRFtPPSTALFFRKNWLRLTW |
| 3473 | RRGsFDAFFRKNWLRLTW |
| 3474 | RRGsFDATFFRKNWLRLTW |
| 3475 | RRGsFDATGFFRKNWLRLTW |
| 3476 | RRGsFDATGSGFFRKNWLRLTW |
| 3477 | RRGsFDATGSGFFFRKNWLRLTW |
| 3478 | RRGsFDATGSGFSMFFRKNWLRLTW |
| 3479 | RRGsFDATGSGFSmTFFFRKNWLRLT |
| | W |
| 3480 | RRGsFDATGSGFSMTFFFRKNWLRLT |
| | W |
| 3481 | RRGsFEVTLLFFRKNWLRLTW |
| 3482 | RRGsGPEIFTFFFRKNWLRLTW |
| 3483 | RRGsPEMPFYFFRKNWLRLTW |
| 3484 | RRIDIsPSTFRKFFRKNWLRLTW |
| 3485 | RRIDISPsTLRKFFRKNWLRLTW |
| 3486 | RRISLtKRLFFRKNWLRLTW |
| 3487 | RRLDRRwtLFFRKNWLRLTW |
| 3488 | RRLDRRWtLFFRKNWLRLTW |
| 3489 | RRLsFQAEYWFFRKNWLRLTW |
| 3490 | RRLsLFLVLFFRKNWLRLTW |
| 3491 | RRLsVLVDDYFFRKNWLRLTW |
| 3492 | RRMsVGDRAGFFRKNWLRLTW |
| 3493 | RRMsVGDRAGSLPNYFFRKNWLRLTW |
| 3494 | RRNsLRIIFFFRKNWLRLTW |
| 3495 | RRPsQNAISFFFFRKNWLRLTW |
| 3496 | RRPtLTTFFFFRKNWLRLTW |
| 3497 | RRsDSLLSFFFRKNWLRLTW |
| 3498 | RRSDsLLSFFFRKNWLRLTW |
| 3499 | RRSIIsPNFFFRKNWLRLTW |
| 3500 | RRsSFSMEEGDVLFFRKNWLRLTW |
| 3501 | RRSsFSMEEGDVLFFRKNWLRLTW |
| 3502 | RRsSIPITVFFRKNWLRLTW |
| 3503 | RRSsISSWLFFRKNWLRLTW |
| 3504 | RRsSLLSLmFFRKNWLRLTW |
| 3505 | RRsSLLSLMFFRKNWLRLTW |
| 3506 | RRSsLLSLmFFRKNWLRLTW |
| 3507 | RRsSYLLAIFFRKNWLRLTW |
| 3508 | RRSsYLLAIFFRKNWLRLTW |
| 3509 | RRsTGVSFWFFRKNWLRLTW |
| 3510 | RRStGVSFWFFRKNWLRLTW |
| 3511 | RRTsIHDFLFFRKNWLRLTW |
| 3512 | RRVsLSEIGFFFRKNWLRLTW |
| 3513 | RRVsSNGIFDLFFRKNWLRLTW |
| 3514 | RRVSsNGIFDLFFRKNWLRLTW |
| 3515 | RRYsDFAKLFFRKNWLRLTW |
| 3516 | RSELLsFIKFFRKNWLRLTW |
| 3517 | RSFsADNFIGIQRFFRKNWLRLTW |
| 3518 | RSFsGLIKRFFRKNWLRLTW |
| 3519 | RSFsMHDLTTIFFRKNWLRLTW |
| 3520 | RSFsPKSPLELFFRKNWLRLTW |
| 3521 | RSFsPTmKVFFRKNWLRLTW |
| 3522 | RSFSPtMKVFFRKNWLRLTW |
| 3523 | RSFtPLSIFFRKNWLRLTW |
| 3524 | RSFtPLSILKFFRKNWLRLTW |
| 3525 | RSHsPPLKLFFRKNWLRLTW |
| 3526 | RSIRDsGYIDFFRKNWLRLTW |
| 3527 | RSIRDsGYIDcwFFRKNWLRLTW |
| 3528 | RSIRDsGYIDcWFFRKNWLRLTW |
| 3529 | RSISAsDLTFFFRKNWLRLTW |
| 3530 | RSIsNEGLTLFFRKNWLRLTW |
| 3531 | RSIsPLLFFFRKNWLRLTW |
| 3532 | RSIsPWLARFFRKNWLRLTW |
| 3533 | RSIsQSSTDSYFFRKNWLRLTW |
| 3534 | RSIsSLLRFFFRKNWLRLTW |
| 3535 | RSIsTPTcLFFRKNWLRLTW |
| 3536 | RSKsVIEQVFFRKNWLRLTW |
| 3537 | RSKsVIEQVSWFFRKNWLRLTW |
| 3538 | RSLsFSDEMFFRKNWLRLTW |
| 3539 | RSLsPFRRHFFRKNWLRLTW |
| 3540 | RSLsPIIGKDVLFFRKNWLRLTW |
| 3541 | RSLsPILPGRFFRKNWLRLTW |
| 3542 | RSLsPmSGLFFRKNWLRLTW |
| 3543 | RSLsPMSGLFFRKNWLRLTW |
| 3544 | RSLsPSSNSAFFFRKNWLRLTW |
| 3545 | RsLSQELVGVFFRKNWLRLTW |
| 3546 | RsLSVEIVYFFRKNWLRLTW |
| 3547 | RSLsVGSEFFFRKNWLRLTW |
| 3548 | RSLsVPVDLFFRKNWLRLTW |
| 3549 | RSLsVPVDLSRWFFRKNWLRLTW |
| 3550 | RSLtHPPTIFFRKNWLRLTW |
| 3551 | RSmDSVLtLFFRKNWLRLTW |
| 3552 | RSMDSVLtLFFRKNWLRLTW |
| 3553 | RSNsPLPSIFFRKNWLRLTW |
| 3554 | RSPsFGEDYYFFRKNWLRLTW |
| 3555 | RSPsQDFSFFFRKNWLRLTW |
| 3556 | RSQsLPNSLFFRKNWLRLTW |
| 3557 | RSRsAPPNLWFFRKNWLRLTW |
| 3558 | RSRsFDYNYFFRKNWLRLTW |
| 3559 | RSRsFDYNYRFFRKNWLRLTW |
| 3560 | RSRsFSGLIKRFFRKNWLRLTW |
| 3561 | RSRSFsGLIKRFFRKNWLRLTW |
| 3562 | RSRsPFSTTRFFRKNWLRLTW |
| 3563 | RSRsPLELEPEAKFFRKNWLRLTW |
| 3564 | RSRsPLGFYVFFRKNWLRLTW |
| 3565 | RSRsPLLKFFFRKNWLRLTW |
| 3566 | RSRsPSDSAAYFFFRKNWLRLTW |
| 3567 | RSRsVPVSFFFRKNWLRLTW |
| 3568 | RSSsFKDFAKFFRKNWLRLTW |
| 3569 | RSSsFSDTLFFRKNWLRLTW |
| 3570 | RSsSFVLPKFFRKNWLRLTW |
| 3571 | RSSsFVLPKFFRKNWLRLTW |
| 3572 | RsSSFVLPKLFFRKNWLRLTW |
| 3573 | RSsSFVLPKLFFRKNWLRLTW |
| 3574 | RSSsFVLPKLFFRKNWLRLTW |
| 3575 | RsSSLSDFSwFFRKNWLRLTW |
| 3576 | RsSSLSDFSWFFRKNWLRLTW |
| 3577 | RSsSLSDFSwFFRKNWLRLTW |
| 3578 | RSsSLSDFSWFFRKNWLRLTW |
| 3579 | RSSsLSDFSwFFRKNWLRLTW |
| 3580 | RSSsLSDFSWFFRKNWLRLTW |
| 3581 | RsSSPFLSKFFRKNWLRLTW |
| 3582 | RSsSPFLSKFFRKNWLRLTW |
| 3583 | RSSsPPILTKFFRKNWLRLTW |
| 3584 | RSsSTELLSHYFFRKNWLRLTW |
| 3585 | RSSsTELLSHYFFRKNWLRLTW |
| 3586 | RSSsWGRTYFFRKNWLRLTW |
| 3587 | RSStPLPTIFFRKNWLRLTW |
| 3588 | RsTSLSLKYFFRKNWLRLTW |
| 3589 | RStSLSLKYFFRKNWLRLTW |
| 3590 | RSTsLSLKYFFRKNWLRLTW |
| 3591 | RSVsFKLLERWFFRKNWLRLTW |
| 3592 | RSVsPVQDLFFRKNWLRLTW |
| 3593 | RSVsVATGLFFRKNWLRLTW |
| 3594 | RSWsPPPEVSRFFRKNWLRLTW |
| 3595 | RSYRTDIsMFFRKNWLRLTW |
| 3596 | RTAsPPALPKFFRKNWLRLTW |
| 3597 | RTFsDESNVLFFRKNWLRLTW |
| 3598 | RtFSLDTILFFRKNWLRLTW |
| 3599 | RTFsLDTILSSYFFRKNWLRLTW |
| 3600 | RTFSPtYGLFFRKNWLRLTW |
| 3601 | RtHSLLLLLFFRKNWLRLTW |
| 3602 | RtISAQDTLAYFFRKNWLRLTW |
| 3603 | RTIsAQDTLAYFFRKNWLRLTW |
| 3604 | RTIsNPEVVmKFFRKNWLRLTW |
| 3605 | RTIsNPEVVMKFFRKNWLRLTW |
| 3606 | RTKsFLNYYFFRKNWLRLTW |
| 3607 | RTLsESFSRIALKFFRKNWLRLTW |
| 3608 | RTLsGSILDVYFFRKNWLRLTW |
| 3609 | RtmSEAALVRKFFRKNWLRLTW |
| 3610 | RtMSEAALVRKFFRKNWLRLTW |
| 3611 | RTmsPIQVLFFRKNWLRLTW |
| 3612 | RTMsPIQVLFFRKNWLRLTW |
| 3613 | RTPsPARPALFFRKNWLRLTW |
| 3614 | RTRLsPPRAFFRKNWLRLTW |
| 3615 | RTVsPAHVLFFRKNWLRLTW |
| 3616 | RTYsFTSAmFFRKNWLRLTW |
| 3617 | RTYsFTSAMFFRKNWLRLTW |
| 3618 | RVASPtSGVFFRKNWLRLTW |
| 3619 | RVDSLVsLFFRKNWLRLTW |
| 3620 | RVDsTTcLFFFRKNWLRLTW |
| 3621 | RVDStTcLFFFRKNWLRLTW |
| 3622 | RVDSTtcLFFFRKNWLRLTW |
| 3623 | RVIsLEDFMEKFFRKNWLRLTW |
| 3624 | RVKTPtSQSYFFRKNWLRLTW |
| 3625 | RVKVDGPRsPSYFFRKNWLRLTW |
| 3626 | RVKVDGPRSPsYFFRKNWLRLTW |
| 3627 | RVLsPLmSRFFRKNWLRLTW |
| 3628 | RVLsPLMSRFFRKNWLRLTW |
| 3629 | RVPsINQKIFFRKNWLRLTW |
| 3630 | RVRsFLRGLPFFRKNWLRLTW |
| 3631 | RVRsPGTGAFFFRKNWLRLTW |
| 3632 | RVsSLTLHLFFRKNWLRLTW |
| 3633 | RVSsLTLHLFFRKNWLRLTW |
| 3634 | RVSSLtLHLFFRKNWLRLTW |
| 3635 | RVVLtPLKVFFRKNWLRLTW |
| 3636 | RVVsPGIDLFFRKNWLRLTW |
| 3637 | RVYsLDDIRRYFFRKNWLRLTW |
| 3638 | RVYsRFEVFFFRKNWLRLTW |
| 3639 | RVYYsPPVARRFFRKNWLRLTW |
| 3640 | RWNsKENLLFFRKNWLRLTW |
| 3641 | RYARYsPRQRFFRKNWLRLTW |
| 3642 | RYDsRTTIFFFRKNWLRLTW |
| 3643 | RYFKtPRKFFFRKNWLRLTW |
| 3644 | RYHsLAPmYYFFRKNWLRLTW |
| 3645 | RYHsLAPMYYFFRKNWLRLTW |
| 3646 | RYtNRVVTLFFRKNWLRLTW |
| 3647 | SAFsSRGSLSLFFRKNWLRLTW |
| 3648 | sAISPTPEIFFRKNWLRLTW |
| 3649 | SAIsPTPEIFFRKNWLRLTW |
| 3650 | SAYGGLTsPGLSYFFRKNWLRLTW |
| 3651 | SEAsLASALFFRKNWLRLTW |
| 3652 | SEFKAmDsIFFRKNWLRLTW |
| 3653 | SEFsDVDKLFFRKNWLRLTW |
| 3654 | SEIsPIKGSVRFFRKNWLRLTW |
| 3655 | SELRsPRISYFFRKNWLRLTW |
| 3656 | SELtPSESLFFRKNWLRLTW |
| 3657 | SELTPsESLFFRKNWLRLTW |
| 3658 | SEsSIKKKFLFFRKNWLRLTW |
| 3659 | SESsIKKKFLFFRKNWLRLTW |
| 3660 | SFDsREASFFFRKNWLRLTW |
| 3661 | SFLsQDESHDHSFFFRKNWLRLTW |
| 3662 | sGEGDFLAEGGGVRFFRKNWLRLTW |
| 3663 | SGFRsPHLwFFRKNWLRLTW |
| 3664 | SGFRsPHLWFFRKNWLRLTW |
| 3665 | SIDIsQDKLFFRKNWLRLTW |
| 3666 | sIDSPKSYIFFRKNWLRLTW |
| 3667 | SIFRtPISKFFRKNWLRLTW |
| 3668 | SIIKEKtVFFRKNWLRLTW |
| 3669 | SIIsPKVKMALFFRKNWLRLTW |
| 3670 | SIIsPNFSFFFRKNWLRLTW |
| 3671 | SILsRTPSVFFRKNWLRLTW |
| 3672 | sIPSLVDGFFFRKNWLRLTW |
| 3673 | SIPsLVDGFFFRKNWLRLTW |
| 3674 | SIPTVsGQIFFRKNWLRLTW |
| 3675 | SISsIDRELFFRKNWLRLTW |
| 3676 | SISsmEVNVFFRKNWLRLTW |
| 3677 | SIsTLVTLFFRKNWLRLTW |
| 3678 | SIStLVTLFFRKNWLRLTW |
| 3679 | SItSLEAIIFFRKNWLRLTW |
| 3680 | SIVsPRKLPALFFRKNWLRLTW |
| 3681 | SKMAFLtRVAFFRKNWLRLTW |
| 3682 | SLAsKVTRLFFRKNWLRLTW |
| 3683 | SLAsLLAKVFFRKNWLRLTW |
| 3684 | SLDsPGPEKmALFFRKNWLRLTW |
| 3685 | SLDsPGPEKMALFFRKNWLRLTW |
| 3686 | SLFGsPVAKFFRKNWLRLTW |
| 3687 | SLFHtPKFVFFRKNWLRLTW |
| 3688 | SLFSsEESNLGAFFRKNWLRLTW |
| 3689 | SLLsELQHAFFRKNWLRLTW |
| 3690 | SLLsLSATVFFRKNWLRLTW |
| 3691 | SLLsVSHALFFRKNWLRLTW |
| 3692 | SLLtPVRLPSIFFRKNWLRLTW |
| 3693 | SLmsGTLESLFFRKNWLRLTW |
| 3694 | SLmSGtLESLFFRKNWLRLTW |
| 3695 | SLMSGtLESLFFRKNWLRLTW |
| 3696 | SLSsERYYLFFRKNWLRLTW |
| 3697 | SLsSLRAHLEYFFRKNWLRLTW |
| 3698 | SLSsLRAHLEYFFRKNWLRLTW |
| 3699 | SmKsPLYLVSRFFRKNWLRLTW |
| 3700 | SMKsPLYLVSRFFRKNWLRLTW |
| 3701 | SPAARSLsLFFRKNWLRLTW |
| 3702 | SPAsPLKELFFRKNWLRLTW |
| 3703 | SPDIsPPIFRRFFRKNWLRLTW |
| 3704 | SPFKRQLsFFRKNWLRLTW |
| 3705 | SPFLSKRsLFFRKNWLRLTW |
| 3706 | SPFSSRsPSLFFRKNWLRLTW |
| 3707 | SPGsPWKTKLFFRKNWLRLTW |
| 3708 | sPHSPFYQLFFRKNWLRLTW |
| 3709 | SPHsPFYQLFFRKNWLRLTW |
| 3710 | SPIsDEEERLFFRKNWLRLTW |
| 3711 | SPIsPRTQDALFFRKNWLRLTW |
| 3712 | SPIsPTRQDALFFRKNWLRLTW |
| 3713 | SPITSsPPKWFFRKNWLRLTW |
| 3714 | SPKPPtRSPFFRKNWLRLTW |
| 3715 | SPKPPTRsPFFRKNWLRLTW |
| 3716 | SPPsPARWSLFFRKNWLRLTW |
| 3717 | SPRAGsPFFFRKNWLRLTW |
| 3718 | SPRAGsPFSPPPSSSSLFFRKNWLRL |
| | TW |
| 3719 | SPRLVsRSSSVLFFRKNWLRLTW |
| 3720 | SPRPPNSPsIFFRKNWLRLTW |
| 3721 | SPRPPNsPSISIFFRKNWLRLTW |
| 3722 | SPRPtSAPAIFFRKNWLRLTW |
| 3723 | SPRPTsAPAIFFRKNWLRLTW |
| 3724 | SPRRPsRVSEFFFRKNWLRLTW |
| 3725 | SPRRPsRVSEFLFFRKNWLRLTW |
| 3726 | sPRSPISPELFFRKNWLRLTW |
| 3727 | SPRsPISPELFFRKNWLRLTW |
| 3728 | sPRSPSTTYLFFRKNWLRLTW |
| 3729 | SPRsPTTTLFFRKNWLRLTW |
| 3730 | SPRsPVNKTTLFFRKNWLRLTW |
| 3731 | sPRSPVPTTLFFRKNWLRLTW |
| 3732 | SPRsPVPTTLFFRKNWLRLTW |
| 3733 | sPRTPPPLTVFFRKNWLRLTW |
| 3734 | SPRtPPPLTVFFRKNWLRLTW |
| 3735 | SPRTPtPFKHALFFRKNWLRLTW |
| 3736 | SPRtPVSPVKFFFRKNWLRLTW |
| 3737 | SPsPLPVALFFRKNWLRLTW |
| 3738 | SPsPmDPHMFFRKNWLRLTW |
| 3739 | SPsPMDPHmFFRKNWLRLTW |
| 3740 | SPsPMDPHMFFRKNWLRLTW |
| 3741 | SPtSPDYSLFFRKNWLRLTW |
| 3742 | SPtSPFSSLFFRKNWLRLTW |
| 3743 | SPTsPFSSLFFRKNWLRLTW |
| 3744 | SPVNKVRRVsFFFRKNWLRLTW |
| 3745 | SPVsPKSLAFFFRKNWLRLTW |
| 3746 | SPVsPmKELFFRKNWLRLTW |
| 3747 | SQDsPIFmFFRKNWLRLTW |
| 3748 | SQDsPIFMFFRKNWLRLTW |
| 3749 | SQILRTPsLFFRKNWLRLTW |
| 3750 | SRFHsPSTTWFFRKNWLRLTW |
| 3751 | SRFsGGFGAFFRKNWLRLTW |
| 3752 | SRFsGGFGARDYFFRKNWLRLTW |
| 3753 | SRHsGPFFTFFFRKNWLRLTW |
| 3754 | SRKEsYSVYVYFFRKNWLRLTW |
| 3755 | SRKsFVFELFFRKNWLRLTW |
| 3756 | SRLsLRRFFRKNWLRLTW |
| 3757 | SRLsLRRSLFFRKNWLRLTW |
| 3758 | SRPSmsPTPLFFRKNWLRLTW |
| 3759 | SRPSMsPTPLFFRKNWLRLTW |
| 3760 | SRRsIFEMYFFRKNWLRLTW |
| 3761 | SRSsPLKLFFRKNWLRLTW |
| 3762 | SSIsPSTLTLKFFRKNWLRLTW |
| 3763 | SSLsGEELVTKFFRKNWLRLTW |
| 3764 | SSLSsPLNPKFFRKNWLRLTW |
| 3765 | SSSsPFKFKFFRKNWLRLTW |
| 3766 | STAsAITPSVSRFFRKNWLRLTW |
| 3767 | STGGGTVIsRFFRKNWLRLTW |
| 3768 | STsLEKNNVFFRKNWLRLTW |
| 3769 | SVFsPSFGLKFFRKNWLRLTW |
| 3770 | SVIsDDSVLFFRKNWLRLTW |
| 3771 | SVIsGISSRFFRKNWLRLTW |
| 3772 | SVISsPLLKFFRKNWLRLTW |
| 3773 | SVLsPLLNKFFRKNWLRLTW |
| 3774 | SVLsPTSWEKFFRKNWLRLTW |
| 3775 | SVLsYTSVRFFRKNWLRLTW |
| 3776 | SVLtPLLLRFFRKNWLRLTW |
| 3777 | SVPEFPLsPPKKFFRKNWLRLTW |
| 3778 | SVQsDQGYISRFFRKNWLRLTW |
| 3779 | SVSsLEVHFFFRKNWLRLTW |
| 3780 | SVTsPIKmKFFRKNWLRLTW |
| 3781 | SVTsPIKMKFFRKNWLRLTW |
| 3782 | SVVsFDKVKEPRFFRKNWLRLTW |
| 3783 | SVVsGSEMSGKYFFRKNWLRLTW |
| 3784 | SVYsPSGPVNRFFRKNWLRLTW |
| 3785 | SVYSPsGPVNRFFRKNWLRLTW |
| 3786 | SYPsPVPTSFFFRKNWLRLTW |
| 3787 | SYVTTSTRTYsLGFFRKNWLRLTW |
| 3788 | SYYsPSIGFSYFFRKNWLRLTW |
| 3789 | TAIsPPLSVFFRKNWLRLTW |
| 3790 | TELPKRLsLFFRKNWLRLTW |
| 3791 | TESsPGSRQIQLwFFRKNWLRLTW |
| 3792 | TESsPGSRQIQLWFFRKNWLRLTW |
| 3793 | TEVsPSRTIFFRKNWLRLTW |
| 3794 | THALPEsPRLFFRKNWLRLTW |
| 3795 | THDsPFcLFFRKNWLRLTW |
| 3796 | THIsPNAIFFFRKNWLRLTW |
| 3797 | THIsPNAIFKAFFRKNWLRLTW |
| 3798 | TIFsPEGRLYFFRKNWLRLTW |
| 3799 | TImsPAVLKFFRKNWLRLTW |
| 3800 | TIMsPAVLKFFRKNWLRLTW |
| 3801 | TIRSPtTVLFFRKNWLRLTW |
| 3802 | TLAsPSVFKFFRKNWLRLTW |
| 3803 | TLLAsPmLKFFRKNWLRLTW |
| 3804 | TLLsAAHEVELFFRKNWLRLTW |
| 3805 | TLLsPKHKYFFRKNWLRLTW |
| 3806 | TLPsPDKLPGFFFRKNWLRLTW |
| 3807 | TLSCPVtEVIFFRKNWLRLTW |
| 3808 | TLsSIRHMIFFRKNWLRLTW |
| 3809 | TLSsIRHmIFFRKNWLRLTW |
| 3810 | TLSsIRHMIFFRKNWLRLTW |
| 3811 | TLYPRSFsVFFRKNWLRLTW |
| 3812 | TmFLRETsLFFRKNWLRLTW |
| 3813 | TMFLREtSLFFRKNWLRLTW |
| 3814 | TMFLRETsLFFRKNWLRLTW |
| 3815 | TmLsPREKIFYYFFRKNWLRLTW |
| 3816 | TMLsPREKIFYYFFRKNWLRLTW |
| 3817 | TPAGSARGsPTRPNPPFFRKNWLRLT |
| | W |
| 3818 | TPHtPKSLLFFRKNWLRLTW |
| 3819 | TPIsPGRASGmTTLFFRKNWLRLTW |
| 3820 | TPIsPGRASGMTTLFFRKNWLRLTW |
| 3821 | tPPSSEKLVSVMFFRKNWLRLTW |
| 3822 | TPQPsKDTLLFFRKNWLRLTW |
| 3823 | TPsPARPALFFRKNWLRLTW |
| 3824 | TPVsPVKFFFRKNWLRLTW |
| 3825 | TQRKFsLQFFFRKNWLRLTW |
| 3826 | TRDsLLIHLFFRKNWLRLTW |
| 3827 | TSEtPQPPRFFRKNWLRLTW |
| 3828 | TSIsPALARFFRKNWLRLTW |
| 3829 | TSVGsPSNTIGRFFRKNWLRLTW |
| 3830 | TSYNSISSVVsRFFRKNWLRLTW |
| 3831 | TTEVIRKGsITEYFFRKNWLRLTW |
| 3832 | tTGSPTEFLFFRKNWLRLTW |
| 3833 | TtGSPTEFLFFRKNWLRLTW |
| 3834 | TTGsPTEFLFFRKNWLRLTW |
| 3835 | TVFsPDGHLFFFRKNWLRLTW |
| 3836 | TVFSPtLPAAFFRKNWLRLTW |
| 3837 | TVFsPTLPAARFFRKNWLRLTW |
| 3838 | TVFtPVEEKFFRKNWLRLTW |
| 3839 | TVKQKYLsFFFRKNWLRLTW |
| 3840 | TVNsPATYKFFRKNWLRLTW |
| 3841 | TVNsPATYKFFFRKNWLRLTW |
| 3842 | TVStPPPFQGRFFRKNWLRLTW |
| 3843 | TVsTVGISIFFRKNWLRLTW |
| 3844 | TVVsPRALELFFRKNWLRLTW |
| 3845 | TVYSsEEAELLKFFRKNWLRLTW |
| 3846 | TYDDRAYSsFFFRKNWLRLTW |
| 3847 | TYVsSFYHAFFFRKNWLRLTW |
| 3848 | VAKRNsLKELWFFRKNWLRLTW |
| 3849 | VARsPLKEFFFRKNWLRLTW |
| 3850 | VEHsPFSSFFFRKNWLRLTW |
| 3851 | VELsPARSwFFRKNWLRLTW |
| 3852 | VELsPARSWFFRKNWLRLTW |
| 3853 | VELsPLKGSVSWFFRKNWLRLTW |
| 3854 | VETsFRKLSFFFRKNWLRLTW |
| 3855 | VETSFRKLsFFFRKNWLRLTW |
| 3856 | VIDsQELSKFFRKNWLRLTW |
| 3857 | VIKsPSWQRFFRKNWLRLTW |
| 3858 | VImsIRTKLFFRKNWLRLTW |
| 3859 | VIMsIRTKLFFRKNWLRLTW |
| 3860 | VLAsPLKTGRFFRKNWLRLTW |
| 3861 | VLFSsPPQmFFRKNWLRLTW |
| 3862 | VLGsQEALHPVFFRKNWLRLTW |
| 3863 | VLPSQVYsLFFRKNWLRLTW |
| 3864 | VmDsPVHLFFRKNWLRLTW |
| 3865 | VmFRtPLASVFFRKNWLRLTW |
| 3866 | VPFKRLsVVFFFRKNWLRLTW |
| 3867 | VPKGPIHsPVELFFRKNWLRLTW |
| 3868 | VPKKPPPsPFFRKNWLRLTW |
| 3869 | VPNEEDPsLFFRKNWLRLTW |
| 3870 | VPRsPFKVKVLFFRKNWLRLTW |
| 3871 | VPRsPVIKIFFRKNWLRLTW |
| 3872 | VPRtPVGKFFFRKNWLRLTW |
| 3873 | VPSsPLRKAFFRKNWLRLTW |
| 3874 | VPTsPKGRLLFFRKNWLRLTW |
| 3875 | VRKsRAWVLFFRKNWLRLTW |
| 3876 | VRTPSVQsLFFRKNWLRLTW |
| 3877 | VSFsPTDHSLFFRKNWLRLTW |
| 3878 | VSSsPRELLFFRKNWLRLTW |
| 3879 | VVSsPKLAPKFFRKNWLRLTW |
| 3880 | VYIPmsPGAHHFFFRKNWLRLTW |
| 3881 | VYIPMsPGAHHFFFRKNWLRLTW |
| 3882 | VYLPTHtSLFFRKNWLRLTW |
| 3883 | VYLPTHTsLFFRKNWLRLTW |
| 3884 | VYLPTHtSLLFFRKNWLRLTW |
| 3885 | VYLPTHTsLLFFRKNWLRLTW |
| 3886 | VYTsVQAQYFFRKNWLRLTW |
| 3887 | WEDRPStPTILFFRKNWLRLTW |
| 3888 | WEFGKRDsLFFRKNWLRLTW |
| 3889 | WPRsPGRAFLFFRKNWLRLTW |
| 3890 | WVIGsPEILRFFRKNWLRLTW |
| 3891 | YAFsPKIGRFFRKNWLRLTW |
| 3892 | yEKIHLDFLFFRKNWLRLTW |
| 3893 | YEVEPYsPGLFFRKNWLRLTW |
| 3894 | YHLsPRAFLFFRKNWLRLTW |
| 3895 | YILDSsPEKLFFRKNWLRLTW |
| 3896 | YLRsVGDGETVFFRKNWLRLTW |
| 3897 | YLVsPITGEKIFFRKNWLRLTW |
| 3898 | YPDPHsPFAFFRKNWLRLTW |
| 3899 | YPFLDsPNKYSLFFRKNWLRLTW |
| 3900 | YPSFRRSsLFFRKNWLRLTW |
| 3901 | YPtPYPDELFFRKNWLRLTW |
| 3902 | YQLsPTKLPSINFFRKNWLRLTW |
| 3903 | YQRPFSPsAYFFRKNWLRLTW |
| 3904 | YQYsDQGIDYFFRKNWLRLTW |
| 3905 | YRLsPEPTPLFFRKNWLRLTW |
| 3906 | YRPsYSYDYFFRKNWLRLTW |
| 3907 | YRPsYSYDYEFDFFRKNWLRLTW |
| 3908 | YRYDGQHFsLFFRKNWLRLTW |
| 3909 | YRYsLEKALFFRKNWLRLTW |
| 3910 | YSLDsPGPEKmALFFRKNWLRLTW |
| 3911 | YSLDsPGPEKMALFFRKNWLRLTW |
| 3912 | YSLsPSKSYKYFFRKNWLRLTW |
| 3913 | YSmsPGAMRFFRKNWLRLTW |
| 3914 | YSMsPGAmRFFRKNWLRLTW |
| 3915 | YSMsPGAMRFFRKNWLRLTW |
| 3916 | YVKLTPVsLFFRKNWLRLTW |
| 3917 | YVSsPDPQLFFRKNWLRLTW |
| 3918 | YYFsPSGKKFFFRKNWLRLTW |
| 3919 | yYISPRITFFFRKNWLRLTW |
| 4073 | DIAsLVGHEFFFRKNWLRLTW |
| 4074 | DIVsEYTHYFFRKNWLRLTW |
| 4075 | DSADLPPPsALFFRKNWLRLTW |
| 4076 | DVIDsQELSKVSREFFFRKNWLRLTW |
| 4077 | ETRSPsPISIFFRKNWLRLTW |
| 4078 | FKmIRSQsLFFRKNWLRLTW |
| 4079 | GAVsPGALRFFRKNWLRLTW |
| 4080 | GLPsPRGPGLFFRKNWLRLTW |
| 4081 | GRILsGVVTKFFRKNWLRLTW |
| 4082 | GRMIRAEsGPDLRYFFRKNWLRLTW |
| 4083 | GRmIRAEsGPDLRYFFRKNWLRLTW |
| 4084 | HPDGtPPKLFFRKNWLRLTW |
| 4085 | HPHLRKVsVFFRKNWLRLTW |
| 4086 | HRRIDIsPSTLFFRKNWLRLTW |
| 4087 | KAsSLISLLFFRKNWLRLTW |
| 4088 | KASsLISLLFFRKNWLRLTW |
| 4089 | KIPsAVSTVSMFFRKNWLRLTW |
| 4090 | KRFsMVVQDGIVKFFRKNWLRLTW |
| 4091 | KRFsmVVQDGIVKFFRKNWLRLTW |
| 4092 | KRFStEEFVLLFFRKNWLRLTW |
| 4093 | KRIsISISFFRKNWLRLTW |
| 4094 | KRIsISTSGFFRKNWLRLTW |
| 4095 | KRIsISTSGGFFRKNWLRLTW |
| 4096 | KRLsLDSSLVEYFFRKNWLRLTW |
| 4097 | KRLsLPADIRLFFRKNWLRLTW |
| 4098 | KRTsKYFSLFFRKNWLRLTW |
| 4099 | LPRsSSMAAGLFFRKNWLRLTW |
| 4100 | LPRSsSMAAGLFFRKNWLRLTW |
| 4101 | LQHsFSFAGFFFRKNWLRLTW |
| 4102 | LtSKLSTKDFFRKNWLRLTW |
| 4103 | NPTMLRTHsLFFRKNWLRLTW |
| 4104 | NRsSPVHIIFFRKNWLRLTW |
| 4105 | QVLPKtVKLFFFRKNWLRLTW |
| 4106 | RLPSPtSPFSSLFFRKNWLRLTW |
| 4107 | RPKLHHsLSFFFRKNWLRLTW |
| 4108 | RPRsDSLILFFRKNWLRLTW |
| 4109 | RQPswDPSPVFFRKNWLRLTW |
| 4110 | RRAsAPLPGLFFRKNWLRLTW |
| 4111 | RRASLsEIGFFRKNWLRLTW |
| 4112 | RRAsLSEIGFFRKNWLRLTW |
| 4113 | RRFsADEQFFFFRKNWLRLTW |
| 4114 | RRFsFSANFYFFRKNWLRLTW |
| 4115 | RRFsPPSSSLFFRKNWLRLTW |
| 4116 | RRIDIsPSFFRKNWLRLTW |
| 4117 | RRIsIVENcFFFRKNWLRLTW |
| 4118 | RRLPIFsRLSIFFRKNWLRLTW |
| 4119 | RRLsAIFLRLFFRKNWLRLTW |
| 4120 | RRLsFLVSYIFFRKNWLRLTW |
| 4121 | RRLsFTLERLFFRKNWLRLTW |
| 4122 | RRLsIEGNIAVFFRKNWLRLTW |
| 4123 | RRLsPPTLLFFRKNWLRLTW |
| 4124 | RSFSPtmKVFFRKNWLRLTW |
| 4125 | RSsSFTFHIFFRKNWLRLTW |
| 4126 | RSSsFTFHIFFRKNWLRLTW |
| 4127 | RtAATEVSLFFRKNWLRLTW |
| 4128 | RVDsTTCLFFFRKNWLRLTW |
| 4129 | RVDsTTcLFPFFRKNWLRLTW |
| 4130 | RVPsEHPYLFFRKNWLRLTW |
| 4131 | SAITPSVSRTsFFFRKNWLRLTW |
| 4132 | SEGsEPALLHFFRKNWLRLTW |
| 4133 | SIAsPDVKLNLFFRKNWLRLTW |
| 4134 | SIKsDVPVYFFRKNWLRLTW |
| 4135 | SLALtPPQAFFRKNWLRLTW |
| 4136 | SLKsRLRFFRKNWLRLTW |
| 4137 | SLPsPHPVRYFFRKNWLRLTW |
| 4138 | SPRPSPVPKPsPPLFFRKNWLRLTW |
| 4139 | SRFsSGGAFFRKNWLRLTW |
| 4140 | SRIVRTPsLFFRKNWLRLTW |
| 4141 | SRTSFTSVsRFFRKNWLRLTW |
| 4142 | TMPTsLPNLFFRKNWLRLTW |
| 4143 | TRLsPIAPAPGFFFRKNWLRLTW |
| 4144 | TSNsQKYmSFFFRKNWLRLTW |
| 4145 | TSTSRYLsLFFRKNWLRLTW |
| 4146 | VKTsGSSDRLFFRKNWLRLTW |
| 4147 | NIKsPALAFFRKNWLRLTW |
| 4148 | LsPRAVSTTFFFRKNWLRLTW |
| 4195 | AHDPSGMFRSQsFFFRKNWLRLTW |
| 4196 | RVAsPAYSLFFRKNWLRLTW |
| 4197 | RRWtLGGMVNRFFRKNWLRLTW |
| 4198 | SIPSTLVsFFFRKNWLRLTW |
| 4199 | RRGsYPFIDFFFRKNWLRLTW |
| 4200 | LtLDQAYSYFFRKNWLRLTW |
| 4201 | SPPsPVEREmFFRKNWLRLTW |
| 4202 | SPPsPVEREMFFRKNWLRLTW |
| 4203 | LYVLsALLIFFRKNWLRLTW |
| 4204 | RPRsLSSPTVFFRKNWLRLTW |
| 4205 | LPIFNRIsVFFRKNWLRLTW |
| 4206 | IPRYHSQsPSmFFRKNWLRLTW |
| 4207 | SPLVRRPsLFFRKNWLRLTW |
| 4208 | EAPKVSRsLFFRKNWLRLTW |
| 4209 | SLDSPsYVLYFFRKNWLRLTW |
| 4210 | REYsPPYAPFFRKNWLRLTW |
| 4211 | YGYEGSEsIFFRKNWLRLTW |
| 4212 | RPSsLPLDFFFRKNWLRLTW |
| 4213 | RPsSLPLDFFFRKNWLRLTW |
| 4214 | TPItPLKDGFFFRKNWLRLTW |
| 4215 | KRFsFKKSFKLFFRKNWLRLTW |
| 4216 | KRNsRLGFLYFFRKNWLRLTW |
| 4217 | RRAsAILPGVLFFRKNWLRLTW |

‘s’, ‘t, and ‘y’ stand for phosphoserine, phosphothreonine, and phosphotyrosine, respectively.
‘m’ stands for oxidized methionine.
‘w’ stands for oxidized tryptophan.
‘c’ stands for cysteinylated cysteine.

[0053] In certain embodiments, the instant disclosure provides: an antigenic polypeptide comprising an MHC-binding peptide comprising an amino acid sequence selected from the group consisting of SEQ ID NOs: 98-1371, 3921-3996, and 4149-4171; and an HSP-binding peptide comprising the amino acid sequence of X₁X₂X₃X₄X₅X₆X₇ (SEQ ID NO: 1), wherein X₁ is omitted, N, F, or Q; X₂ is W, L, or F; X₃ is L or I; X₄ is R, L, or K; X₅ is L, W, or I; X₆ is T, L, F, K, R, or W; and X₇ is W, G, K, or F.

[0054] In certain embodiments, the HSP-binding peptide comprises the amino acid sequence of:
[0055] (a) X₁LX₂LTX₃ (SEQ ID NO: 2), wherein X₁ is W or F; X₂ is R or K; and X₃ is W, F, or G;
[0056] (b) NX₁LX₂LTX₃ (SEQ ID NO: 3), wherein X₁ is W or F; X₂ is R or K; and X₃ is W, F, or G;
[0057] (c) WLX₁LTX₂ (SEQ ID NO: 4), wherein X₁ is R or K; and X₂ is W or G;
[0058] (d) NWLX₁LTX₂ (SEQ ID NO: 5), wherein X₁ is R or K; and X₂ is W or G; or
[0059] (e) NWX₁X₂X₃X₄X₅ (SEQ ID NO: 6), wherein X₁ is L or I; X₂ is L, R, or K; X₃ is L or I; X₄ is T, L, F, K, R, or W; and X₅ is W or K.

[0060] In certain embodiments, the instant disclosure provides: an antigenic polypeptide comprising an MHC-binding peptide comprising an amino acid sequence selected from the group consisting of SEQ ID NOs: 98-1371, 3921-3996, and 4149-4171, optionally wherein the amino acid sequence of the MHC-binding peptide consists of an amino acid sequence selected from the group consisting of SEQ ID NOs: 98-1371, 3921-3996, and 4149-4171; and an HSP-binding peptide comprising an amino acid sequence selected from the group consisting of SEQ ID NOs: 1-42, optionally wherein the amino acid sequence of the HSP-binding peptide consists of an amino acid sequence selected from the group consisting of SEQ ID NOs: 1-42.

[0061] In certain embodiments, the C-terminus of the MHC-binding peptide is linked (either directly or indirectly) to the N-terminus of the HSP-binding peptide. Accordingly, in certain embodiments, the antigenic polypeptide comprises an MHC-binding peptide comprising an amino acid sequence selected from the group consisting of SEQ ID NOs: 98-1371, 3921-3996, and 4149-4171, and an HSP-binding peptide comprising an amino acid sequence selected from the group consisting of SEQ ID NOs: 1-42, wherein the C-terminus of the MHC-binding peptide is linked (either directly or indirectly) to the N-terminus of the HSP-binding peptide.

[0062] In certain embodiments, the N-terminus of the MHC-binding peptide is linked (either directly or indirectly) to the C-terminus of the HSP-binding peptide. Accordingly, in certain embodiments, the antigenic polypeptide comprises an MHC-binding peptide comprising an amino acid sequence selected from the group consisting of SEQ ID NOs: 98-1371, 3921-3996, and 4149-4171, and an HSP-binding peptide comprising an amino acid sequence selected from the group consisting of SEQ ID NOs: 1-42, wherein the N-terminus of the MHC-binding peptide is linked (either directly or indirectly) to the C-terminus of the HSP-binding peptide.

[0063] In certain embodiments, the MHC-binding peptide is 8 to 50 amino acids in length, optionally 8, 9, 10, 11, 12, 13, 14, 15, 16, 17, 18, 19, 20, 21, 22, 23, 24, 25, 26, 27, 28, 29, 30, 31, 32, 33, 34, 35, 36, 37, 38, 39, 40, 41, 42, 43, 44, 45, 46, 47, 48, 49, or 50 amino acids in length.

[0064] In certain embodiments, the HSP-binding peptide is 6, 7, 8, 9, 10, 11, 12, 13, 14, 15, 16, 17, 18, 19, 20, 21, 22, 23, 24, 25, 26, 27, 28, 29, 30, 31, 32, 33, 34, 35, 36, 37, 38, 39, 40, 41, 42, 43, 44, 45, 46, 47, 48, 49, or 50 amino acids in length. In certain embodiments, the HSP-binding peptide is less than 7, 8, 9, 10, 11, 12, 13, 14, 15, 16, 17, 18, 19, 20, 21, 22, 23, 24, 25, 26, 27, 28, 29, 30, 31, 32, 33, 34, 35, 36, 37, 38, 39, 40, 41, 42, 43, 44, 45, 46, 47, 48, 49, or 50 amino acids in length.

[0065] In certain embodiments, the HSP-binding peptide is linked to the MHC-binding peptide via a chemical linker. Any chemical linkers can be employed to link the HSP-binding peptide and the MHC-binding peptide. Exemplary chemical linkers include moieties generated from chemical crosslinking (see, e.g., Wong, 1991, Chemistry of Protein Conjugation and Cross-Linking, CRC Press, incorporated herein by reference in its entirety), UV crosslinking, and click chemistry reactions (see, e.g., U.S. Patent Publication 20130266512, which is incorporated by reference herein in its entirety).

[0066] In certain embodiments, the HSP-binding peptide is linked to the MHC-binding peptide via a peptide linker (e.g., a peptide linker as disclosed herein). In certain embodiments, the peptide linker comprises the amino acid sequence of SEQ ID NO: 43 or FR. In certain embodiments, the amino acid sequence of the peptide linker consists of the amino acid sequence of SEQ ID NO: 43 or FR.

[0067] In certain embodiments, the C-terminus of the MHC-binding peptide is linked by the peptide linker of SEQ ID NO: 43 or FR to the N-terminus of the HSP-binding peptide. Accordingly, in certain embodiments, the antigenic polypeptide comprises from N-terminus to C-terminus: an MHC-binding peptide comprising an amino acid sequence selected from the group consisting of SEQ ID NOs: 98-1371, 3921-3996, and 4149-4171; the peptide linker of SEQ ID NO: 43 or FR; and an HSP-binding peptide comprising an amino acid sequence selected from the group consisting of SEQ ID NOs: 1-42. In certain embodiments, the amino acid sequence of the MHC-binding peptide consists of an amino acid sequence selected from the group consisting of SEQ ID NOs: 98-1371, 3921-3996, and 4149-4171, and the amino acid sequence of the HSP-binding peptide consists of an amino acid sequence selected from the group consisting of SEQ ID NOs: 1-42.

[0068] In certain embodiments, the antigenic polypeptide comprises an amino acid sequence selected from the group consisting of SEQ ID NOs: 1372-3919, 3997-4148, and 4172-4217. In certain embodiments, the amino acid sequence of the antigenic polypeptide consists of an amino acid sequence selected from the group consisting of SEQ ID NOs: 1372-3919, 3997-4148, and 4172-4217. In certain embodiments, the antigenic polypeptide consists of an amino acid sequence selected from the group consisting of SEQ ID NOs: 1372-3919, 3997-4148, and 4172-4217.

[0069] In certain embodiments, the N-terminus of the MHC-binding peptide is linked by the peptide linker of SEQ ID NO: 43 or FR to the C-terminus of the HSP-binding peptide. Accordingly, in certain embodiments the antigenic polypeptide comprises from N-terminus to C-terminus: an HSP-binding peptide comprising an amino acid sequence selected from the group consisting of SEQ ID NOs: 1-42; the peptide linker of SEQ ID NO: 43 or FR; and an MHC-binding peptide comprising an amino acid sequence selected from the group consisting of SEQ ID NOs: 98-1371, 3921-3996, and 4149-4171. In certain embodiments, the amino acid sequence of the MHC-binding peptide consists of an amino acid sequence selected from the group consisting of SEQ ID NOs: 98-1371, 3921-3996, and 4149-4171, and the amino acid sequence of the HSP-binding peptide consists of an amino acid sequence selected from the group consisting of SEQ ID NOs: 1-42.

[0070] In certain embodiments, the antigenic polypeptide comprises an MHC-binding peptide comprising an amino acid sequence selected from the group consisting of SEQ ID NOs: 98-1371, 3921-3996, and 4149-4171, and wherein the N-terminus of the MHC-binding peptide is linked to the C-terminus of an amino acid sequence selected from the group consisting of SEQ ID NOs: 74-97. In certain embodiments, the amino acid sequence of the MHC-binding peptide consists of an amino acid sequence selected from the group consisting of SEQ ID NOs: 98-1371, 3921-3996, and 4149-4171.

[0071] In certain embodiments, the antigenic polypeptide comprises an MHC-binding peptide comprising an amino acid sequence selected from the group consisting of SEQ ID NOs: 98-1371, 3921-3996, and 4149-4171, and wherein the C-terminus of the MHC-binding peptide is linked to the N-terminus of an amino acid sequence selected from the group consisting of SEQ ID NOs: 50-67. In certain embodiments, the amino acid sequence of the MHC-binding peptide consists of an amino acid sequence selected from the group consisting of SEQ ID NOs: 98-1371, 3921-3996, and 4149-4171.

[0072] In certain embodiments, the antigenic peptides disclosed herein are 8 to 100 amino acids, (e.g., 8, 9, 10, 11, 12, 13, 14, 15, 16, 17, 18, 19, 20, 21, 22, 23, 24, 25, 26, 27, 28, 29, 30, 31, 32, 33, 34, 35, 36, 37, 38, 39, 40, 41, 42, 43, 44, 45, 46, 47, 48, 49, 50, 51, 52, 53, 54, 55, 56, 57, 58, 59, 60, 61, 62, 63, 64, 65, 66, 67, 68, 69, 70, 71, 72, 73, 74, 75, 76, 77, 78, 79, 80, 81, 82, 83, 84, 85, 86, 87, 88, 89, 90, 91, 92, 93, 94, 95, 96, 97, 98, 99, or 100 amino acids) in length. In certain embodiments, an antigenic peptide is 8 to 50 amino acids in length.

[0073] In certain embodiments, the antigenic peptides disclosed herein are less than 9, 10, 11, 12, 13, 14, 15, 16, 17, 18, 19, 20, 21, 22, 23, 24, 25, 26, 27, 28, 29, 30, 31, 32, 33, 34, 35, 36, 37, 38, 39, 40, 41, 42, 43, 44, 45, 46, 47, 48, 49, 50, 51, 52, 53, 54, 55, 56, 57, 58, 59, 60, 61, 62, 63, 64, 65, 66, 67, 68, 69, 70, 71, 72, 73, 74, 75, 76, 77, 78, 79, 80, 81, 82, 83, 84, 85, 86, 87, 88, 89, 90, 91, 92, 93, 94, 95, 96, 97, 98, 99, or 100 amino acids in length.

[0074] In certain embodiments, the amino acid sequence of the antigenic polypeptides disclosed herein does not comprise more than 8, 9, 10, 11, 12, 13, 14, 15, 16, 17, 18, 19, 20, 21, 22, 23, 24, 25, 26, 27, 28, 29, 30, 31, 32, 33, 34, 35, 36, 37, 38, 39, 40, 41, 42, 43, 44, 45, 46, 47, 48, 49, 50, 51, 52, 53, 54, 55, 56, 57, 58, 59, 60, 61, 62, 63, 64, 65, 66, 67, 68, 69, 70, 71, 72, 73, 74, 75, 76, 77, 78, 79, 80, 81, 82, 83, 84, 85, 86, 87, 88, 89, 90, 91, 92, 93, 94, 95, 96, 97, 98, 99, or 100 contiguous amino acids of a protein (e.g., a naturally occurring protein) that comprises an amino acid sequence selected from the group consisting of SEQ ID NO: 98-1371, 3921-3996, and 4149-4171.

[0075] The antigenic polypeptide disclosed herein can comprise one or more MHC-binding peptides. In certain embodiments, the antigenic peptide comprises one MHC-binding peptides. In certain embodiments, the antigenic polypeptide comprises two or more (e.g., 3, 4, 5, 6, 7, 8, 9, 10, or more) MHC-binding peptides. The two or more MHC-binding peptides can be linked via a chemical linker or a peptide linker, wherein the peptide linker optionally comprises an amino acid sequence that can be recognized and/or cleaved by a protease.

[0076] In certain embodiments, the instant disclosure provides a polypeptide comprising an amino acid sequence selected from the group consisting of SEQ ID NOs: 98-3919 and 3921-4217. In certain embodiments, the polypeptide is 8 to 100 amino acids, (e.g., 8, 9, 10, 11, 12, 13, 14, 15, 16, 17, 18, 19, 20, 21, 22, 23, 24, 25, 26, 27, 28, 29, 30, 31, 32, 33, 34, 35, 36, 37, 38, 39, 40, 41, 42, 43, 44, 45, 46, 47, 48, 49, 50, 51, 52, 53, 54, 55, 56, 57, 58, 59, 60, 61, 62, 63, 64, 65, 66, 67, 68, 69, 70, 71, 72, 73, 74, 75, 76, 77, 78, 79, 80, 81, 82, 83, 84, 85, 86, 87, 88, 89, 90, 91, 92, 93, 94, 95, 96, 97, 98, 99, or 100 amino acids) in length. In certain embodiments, the polypeptide peptide is 8 to 50 amino acids in length. In certain embodiments, the amino acid sequence of the polypeptide consists of an amino acid sequence selected from the group consisting of SEQ ID NOs: 98-3919 and 3921-4217. In certain embodiments, the polypeptide consists of an amino acid sequence selected from the group consisting of SEQ ID NOs: 98-3919 and 3921-4217.

[0077] The skilled worker will appreciate that the antigenic polypeptides disclosed herein also encompass derivatives of antigenic polypeptides that are modified during or after synthesis. Such modifications include, but are not limited to: glycosylation, acetylation, methylation, phosphorylation (e.g., phosphorylation of Tyr, Ser, Thr, Arg, Lys, or His on a side chain hydroxyl or amine), formylation, or amidation (e.g., amidation of a C-terminal carboxyl group); derivatization using reactive chemical groups (e.g., derivatization of: free NH₂, COOH, or OH groups); specific chemical cleavage (e.g., by cyanogen bromide, hydroxylamine, BNPS-Skatole, acid, NaBH₄, or alkali hydrolysis); enzymatic cleavage (e.g., by trypsin, chymotrypsin, papain, V8 protease; oxidation; reduction; etc. Methods for effecting the foregoing modification to antigenic polypeptides are well known in the art.

[0078] In certain embodiments, the antigenic polypeptide comprises one or more modified amino acid residues (e.g., in the MHC-binding peptide portion of the antigenic polypeptide). In certain embodiments, the antigenic polypeptide comprises a phosphorylated residue (e.g., a Tyr, Ser, Thr, Arg, Lys, or His that has been phosphorylated on a side chain hydroxyl or amine). In certain embodiments, the antigenic polypeptide comprises a phosphomimetic residue (e.g., a mimetic of a Tyr, Ser, Thr, Arg, Lys, or His amino acid that has been phosphorylated on a side chain hydroxyl or amine). Non-limiting examples of phosphomimetic groups include O-boranophospho, borono, O-dithiophospho, phosphoramide, H-phosphonate, alkylphosphonate, phosphorothioate, phosphodithioate and phosphorofluoridate, any of which may be derivatized on Tyr, Thr, Ser, Arg, Lys, or His residues. In certain embodiments, an Asp or Glu residue is used as a phosphomimetic in place of a phospho-Tyr, phospho-Thr, phospho-Ser, phospho-Arg, phospho-Lys and/or phospho-His residue in a peptide. In certain embodiments, the phosphomimetic residue is a non-hydrolyzable analogue of a phosphorylated residue. Accordingly, in certain embodiments, the antigenic polypeptide comprises a phosphopeptide selected from the group consisting of SEQ ID NOs: 98-1371, 3921-3996, and 4149-4171, wherein a phosphorylated amino acid residue of the phosphopeptide is replaced by a non-hydrolyzable mimetic of the phosphorylated amino acid residue.

[0079] The skilled worker will further appreciate that, in certain embodiments, the antigenic polypeptides disclosed herein can comprise one or more natural and/or non-natural amino acids (e.g., D-amino acids), and amino acid analogues and derivatives (e.g., disubstituted amino acids, N-alkyl amino acids, lactic acid, 4-hydroxyproline, γ-carboxyglutamate, ε-N,N,N-trimethyllysine, ε-N-acetyllysine, O-phosphoserine, N-acetylserine, N-formylmethionine, 3-methylhistidine, 5-hydroxylysine, σ-N-methylarginine). In certain embodiments, the antigenic polypeptides disclosed herein comprise one or more retro-inverso peptides. A “retro-inverso peptide” refers to a peptide with a reversal of the peptide sequence in two or more positions and inversion of the stereochemistry from L to D configuration in chiral amino acids. Thus, a retro-inverso peptide has reversed termini, reversed direction of peptide bonds, and reversed peptide sequence from N-to-C-terminus, while approximately maintaining the topology of the side chains as in the native peptide sequence. Synthesis of retro-inverso peptide analogues are described in Bonelli, F. et al., Int J Pept Protein Res. 24(6):553-6 (1984); Verdini, A and Viscomi, G. C, J. Chem. Soc. Perkin Trans. 1:697-701 (1985); and U.S. Pat. No. 6,261,569, which are incorporated herein in their entirety by reference.

### 6.2.1 Production of Antigenic Polypeptides by Chemical Synthesis

[0080] Antigenic polypeptides disclosed herein can be synthesized by standard chemical methods including the use of a peptide synthesizer. Conventional peptide synthesis or other synthetic protocols well known in the art can be used.

[0081] In certain embodiments, the polypeptide disclosed herein consists of amino acid residues (natural or non-natural) linked by peptide bonds. Such polypeptides can be synthesized, for example, by solid-phase peptide synthesis using procedures similar to those described by Merrifield, 1963, J. Am. Chem. Soc., 85:2149, incorporated herein by reference in its entirety. During synthesis, N-α-protected amino acids having protected side chains are added stepwise to a growing polypeptide chain linked by its C-terminal and to an insoluble polymeric support i.e., polystyrene beads. The polypeptides are synthesized by linking an amino group of an N-α-deprotected amino acid to an α-carboxyl group of an N-α-protected amino acid that has been activated by reacting it with a reagent such as dicyclohexylcarbodiimide or 2-(6-Chloro-1-H-benzotriazole-1-yl)-1,1,3,3-tetramethylaminium hexafluorophosphate. The attachment of a free amino group to the activated carboxyl leads to peptide bond formation. The most commonly used N-α-protecting groups include Boc which is acid labile and Fmoc which is base labile. Details of appropriate chemistries, resins, protecting groups, protected amino acids and reagents are well known in the art (See, Atherton, et al., 1989, Solid Phase Peptide Synthesis: A Practical Approach, IRL Press, and Bodanszky, 1993, Peptide Chemistry, A Practical Textbook, 2nd Ed., Springer-Verlag, each of which is incorporated herein by reference in its entirety).

[0082] In addition, analogs and derivatives of polypeptides can be chemically synthesized as described supra. If desired, nonclassical amino acids or chemical amino acid analogs can be introduced as a substitution or addition into the peptide sequence. Non-classical amino acids include, but are not limited to, the D-isomers of the common amino acids, α-amino isobutyric acid, 4-aminobutyric acid, hydroxyproline, sarcosine, citrulline, cysteic acid, t-butylglycine, t-butylalanine, phenylglycine, cyclohexylalanine, β-alanine, designer amino acids such as β-methyl amino acids, C-α-methyl amino acids, and N-α-methyl amino acids.

[0083] Polypeptides phosphorylated on the side chains of Tyr, Ser, Thr, Arg, Lys, and His can be synthesized in Fmoc solid phase synthesis using the appropriate side chain protected Fmoc-phospho amino acid. In this way, polypeptides with a combination of phosphorylated and non-phosphorylated Tyr, Ser, Thr, Arg, Lys, and His residues can be synthesized. For example, the method of Staerkaer et al can be applied (1991, Tetrahedron Letters 32: 5389-5392). Other procedures (some for specific amino acids) are detailed in De Bont et al. (1987, Trav. Chim Pays Bas 106: 641, 642), Bannwarth and Trezeciak (1987, Helv. Chim. Acta 70: 175-186), Perich and Johns (1988, Tetrahedron Letters 29: 2369-2372), Kitas et al. (1990, J. Org. Chem. 55:4181-4187), Valerio et al. (1989, Int. J. Peptide Protein Res. 33:428-438), Perich et al. (1991, Tetrahedron Letters 32:4033-4034), Pennington (1994, Meth. Molec. Biol. 35:195-2), and Perich (1997, Methods Enzymol. 289:245-266, each of which is incorporated herein by reference in its entirety).

[0084] A phosphorylated polypeptide can also be produced by first culturing a cell transformed with a nucleic acid that encodes the amino acid sequence of the polypeptide. After producing such a polypeptide by cell culture, the hydroxyl groups of the appropriate amino acid are substituted by phosphate groups using organic synthesis or enzymatic methods with phosphorylation enzymes. For example, in the case of serine-specific phosphorylation, serine kinases can be used.

[0085] Phosphopeptide mimetics can also be synthesized, wherein a phosphorylated amino acid residue in a polypeptide is replaced with a phosphomimetic group. Non-limiting examples of phosphomimetic groups include O-boranophospho, borono, O-dithiophospho, phosphoramide, H-phosphonate, alkylphosphonate, phosphorothioate, phosphodithioate and phosphorofluoridate, any of which may be derivatized on Tyr, Thr, Ser, Arg, Lys, or His residues. In certain embodiments, an Asp or Glu residue is used as a phosphomimetic. Asp or Glu residues can also function as phosphomimetic groups, and be used in place of a phospho-Tyr, phospho-Thr, phospho-Ser, phospho-Arg, phospho-Lys and/or phospho-His residue in a peptide.

[0086] Purification of the resulting peptide is accomplished using conventional procedures, such as preparative HPLC using reverse-phase, gel permeation, partition and/or ion exchange chromatography. The choice of appropriate matrices and buffers are well known in the art and so are not described in detail herein.

### 6.2.2 Production of Antigenic Polypeptides Using Recombinant DNA Technology

[0087] Polypeptides disclosed herein can also be prepared by recombinant DNA methods known in the art. A nucleic acid sequence encoding a polypeptide can be obtained by back translation of the amino acid sequence and synthesized by standard chemical methods, such as the use of an oligonucleotide synthesizer. Alternatively, coding information for polypeptides can be obtained from DNA templates using specifically designed oligonucleotide primers and PCR methodologies. Variations and fragments of the polypeptides can be made by substitutions, insertions or deletions that provide for functionally equivalent molecules. Due to the degeneracy of nucleotide coding sequences, DNA sequences which encode the same or a variant of a polypeptide may be used in the practice of the present invention. These include, but are not limited to, nucleotide sequences which are altered by the substitution of different codons that encode a functionally equivalent amino acid residue within the sequence, thus producing a silent or conservative change. The nucleic acid encoding a polypeptide can be inserted into an expression vector for propagation and expression in host cells.

[0088] As the coding sequence for peptides of the length contemplated herein can be synthesized by chemical techniques, for example, the phosphotriester method of Matteucci et al., J. Am. Chem. Soc. 103:3185 (1981) (incorporated herein by reference in its entirety), modification can be made simply by substituting the appropriate base(s) for those encoding the native peptide sequence. The coding sequence can then be provided with appropriate linkers and ligated into expression vectors commonly available in the art, and the vectors used to transform suitable hosts to produce the desired peptide or fusion protein. A number of such vectors and suitable host systems are now available. For expression of the peptide or fusion proteins, the coding sequence will be provided with operably linked start and stop codons, promoter and terminator regions and usually a replication system to provide an expression vector for expression in the desired cellular host.

[0089] An expression construct refers to a nucleotide sequence encoding a polypeptide operably linked with one or more regulatory regions which enables expression of the peptide in an appropriate host cell. “Operably-linked” refers to an association in which the regulatory regions and the peptide sequence to be expressed are joined and positioned in such a way as to permit transcription, and ultimately, translation.

[0090] The regulatory regions necessary for transcription of the peptide can be provided by the expression vector. A translation initiation codon (ATG) may also be provided if the peptide gene sequence lacking its cognate initiation codon is to be expressed. In a compatible host-construct system, cellular transcriptional factors, such as RNA polymerase, will bind to the regulatory regions on the expression construct to effect transcription of the peptide sequence in the host organism. The precise nature of the regulatory regions needed for gene expression may vary from host cell to host cell. Generally, a promoter is required which is capable of binding RNA polymerase and promoting the transcription of an operably-associated nucleic acid sequence. Such regulatory regions may include those 5′ non-coding sequences involved with initiation of transcription and translation, such as the TATA box, capping sequence, CAAT sequence, and the like. The non-coding region 3′ to the coding sequence may contain transcriptional termination regulatory sequences, such as terminators and polyadenylation sites.

[0091] In order to attach DNA sequences with regulatory functions, such as promoters, to the peptide gene sequence or to insert the peptide gene sequence into the cloning site of a vector, linkers or adapters providing the appropriate compatible restriction sites may be ligated to the ends of the cDNAs by techniques well known in the art (Wu et al., 1987, Methods in Enzymol 152:343-349, incorporated herein by reference in its entirety). Cleavage with a restriction enzyme can be followed by modification to create blunt ends by digesting back or filling in single-stranded DNA termini before ligation. Alternatively, a desired restriction enzyme site can be introduced into a fragment of DNA by amplification of the DNA by use of PCR with primers containing the desired restriction enzyme site.

[0092] An expression construct comprising a polypeptide coding sequence operably linked with regulatory regions can be directly introduced into appropriate host cells for expression and production of the peptide without further cloning. The expression constructs can also contain DNA sequences that facilitate integration of the DNA sequence into the genome of the host cell, e.g., via homologous recombination. In this instance, it is not necessary to use an expression vector comprising a replication origin suitable for appropriate host cells in order to propagate and express the peptide in the host cells.

[0093] A variety of expression vectors may be used including plasmids, cosmids, phage, phagemids or modified viruses. Typically, such expression vectors comprise a functional origin of replication for propagation of the vector in an appropriate host cell, one or more restriction endonuclease sites for insertion of the peptide gene sequence, and one or more selection markers. Expression vectors may be constructed to carry nucleotide sequences for one or more of the polypeptides disclosed herein. The expression vector must be used with a compatible host cell which may be derived from a prokaryotic or eukaryotic organism including but not limited to bacteria, yeasts, insects, mammals and humans. Such host cells can be transformed to express one or more polypeptides disclosed herein, such as by transformation of the host cell with a single expression vector containing a plurality of nucleotide sequences encoding any of the polypeptides disclosed herein, or by transformation of the host cell with multiple expression vectors encoding different polypeptides disclosed herein.

[0094] In bacterial systems, a number of expression vectors may be advantageously selected to produce polypeptides. For example, when a large quantity of such a protein is to be produced, such as for the generation of pharmaceutical compositions, vectors that direct the expression of high levels of fusion protein products that are readily purified may be desirable. Such vectors include the E. coli expression vector pUR278 (Ruther et al., 1983, EMBO J. 2, 1791, incorporated herein by reference in its entirety), in which the peptide coding sequence may be ligated individually into the vector in frame with the lac Z coding region so that a fusion protein is produced; pIN vectors (Inouye and Inouye, 1985, Nucleic Acids Res. 13, 3101-3109; Van Heeke and Schuster, 1989, J. Biol. Chem 264, 5503-5509, each of which is incorporated herein by reference in its entirety); and the like. pGEX vectors may also be used to express these peptides as fusion proteins with glutathione S-transferase (GST). In general, such fusion proteins are soluble and can easily be purified from lysed cells by adsorption to glutathione-agarose beads followed by elution in the presence of free glutathione. The pGEX vectors are designed to include thrombin or factor Xa protease cleavage sites so that the polypeptide can be released from the GST moiety.

[0095] Alternatively, for long term, high yield production of properly processed peptide complexes, stable expression in mammalian cells is preferred. Cell lines that stably express peptide complexes may be engineered by using a vector that contains a selectable marker. By way of example, following the introduction of the expression constructs, engineered cells may be allowed to grow for 1-2 days in an enriched media, and then are switched to a selective media. The selectable marker in the expression construct confers resistance to the selection and optimally allows cells to stably integrate the expression construct into their chromosomes and to grow in culture and to be expanded into cell lines. Such cells can be cultured for a long period of time while the peptide is expressed continuously.

[0096] The recombinant cells may be cultured under standard conditions of temperature, incubation time, optical density and media composition. However, conditions for growth of recombinant cells may be different from those for expression of the polypeptides. Modified culture conditions and media may also be used to enhance production of the peptides. For example, recombinant cells containing peptides with their cognate promoters may be exposed to heat or other environmental stress, or chemical stress. Any techniques known in the art may be applied to establish the optimal conditions for producing peptide complexes.

[0097] In one embodiment disclosed herein, a codon encoding methionine is added at the 5′ end of the nucleotide sequence encoding a polypeptide to provide a signal for initiation of translation of the peptide. This methionine may remain attached to the polypeptide, or the methionine may be removed by the addition of an enzyme or enzymes that can catalyze the cleavage of methionine from the peptide. For example, in both prokaryotes and eukaryotes, N-terminal methionine is removed by a methionine aminopeptidase (MAP) (Tsunasawa et al., 1985, J. Biol. Chem. 260, 5382-5391, incorporated herein by reference in its entirety). Methionine aminopeptidases have been isolated and cloned from several organisms, including E. coli, yeast, and rat.

[0098] The peptide may be recovered from the bacterial, mammalian, or other host cell types, or from the culture medium, by known methods (see, for example, Current Protocols in Immunology, vol. 2, chapter 8, Coligan et al. (ed.), John Wiley & Sons, Inc.; Pathogenic and Clinical Microbiology: A Laboratory Manual by Rowland et al., Little Brown & Co., June 1994, incorporated herein by reference in its entirety).

[0099] Both of the foregoing methods can be used for synthesizing a polypeptide disclosed herein. For example, a peptide comprising the amino acid sequence of the HSP-binding peptide can be synthesized chemically, and joined to an antigenic peptide, optionally produced by recombinant DNA technology, via a peptide bond.

[0100] Included within the scope disclosed herein are derivatives or analogs of the polypeptides disclosed herein that are modified during or after translation, e.g., by glycosylation, acetylation, phosphorylation, amidation (e.g., of the C-terminal carboxyl group), or derivatization by known protecting/blocking groups, or proteolytic cleavage. Any of numerous chemical modifications may be carried out by known techniques, including but not limited to, reagents useful for protection or modification of free NH₂— groups, free COOH— groups, OH— groups, side groups of Trp-, Tyr-, Phe-, His-, Arg-, or Lys-; specific chemical cleavage by cyanogen bromide, hydroxylamine, BNPS-Skatole, acid, or alkali hydrolysis; enzymatic cleavage by trypsin, chymotrypsin, papain, V8 protease, NaBH₄; acetylation, formylation, oxidation, reduction; metabolic synthesis in the presence of tunicamycin; etc.

### 6.3 Compositions Comprising Antigenic Polypeptides

[0101] In another aspect, the instant disclosure provides a composition (e.g., a pharmaceutical composition, a vaccine, or a unit dosage form thereof) comprising one or more antigenic polypeptide as disclosed herein. In certain embodiments, the composition comprises a plurality of the antigenic polypeptides disclosed herein. For example, in certain embodiments, the composition comprises 2, 3, 4, 5, 6, 7, 8, 9, 10, 11, 12, 13, 14, 15, 16, 17, 18, 19, 20, 21, 22, 23, 24, 25, 26, 27, 28, 29, 30, 31, 32, 33, 34, 35, 36, 37, 38, 39, 40, 41, 42, 43, 44, 45, 46, 47, 48, 49, or 50 different antigenic polypeptides as disclosed herein.

6.3.1 Compositions Comprising Antigenic Polypeptides in Complex with Stress Proteins

[0102] In certain embodiments, the instant disclosure provides a composition (e.g., a pharmaceutical composition) comprising one or more antigenic polypeptides as disclosed herein and a purified stress protein. In certain embodiments, at least a portion of the purified stress protein binds to the antigenic polypeptide in the composition. Such compositions are useful as vaccines for the treatment of a cancer.

[0103] Stress proteins, which are also referred to interchangeably herein as heat shock proteins (HSPs), useful in the practice of the instant invention can be selected from among any cellular protein that is capable of binding other proteins or peptides and capable of releasing the bound proteins or peptides in the presence of adenosine triphosphate (ATP) or under acidic conditions. The intracellular concentration of such protein may increase when a cell is exposed to a stressful stimulus. In addition to those heat shock proteins that are induced by stress, the HSP60, HSP70, HSP90, HSP100, sHSPs, and PDI families also include proteins that are related to stress-induced HSPs in sequence similarity, for example, having greater than 35% amino acid identity, but whose expression levels are not altered by stress. Therefore, stress protein or heat shock protein embraces other proteins, mutants, analogs, and variants thereof having at least 35% (e.g., at least 40, 45, 50, 55, 60, 65, 70, 75, 80, 85, 90, 95, or 99%) amino acid identity with members of these families whose expression levels in a cell are enhanced in response to a stressful stimulus. Accordingly, in certain embodiments, the stress protein is a member of the hsp60, hsp70, or hsp90 family of stress proteins (e.g., Hsc70, human Hsc70), or a mutant, analog, or variant thereof. In certain embodiments, the stress protein is selected from the group consisting of hsc70, hsp70, hsp90, hsp110, grp170, gp96, calreticulin, a mutant thereof, and combinations of two or more thereof. In certain embodiments, the stress protein is Hsc70 (e.g., human Hsc70). In certain embodiments, the stress protein comprises the amino acid sequence of SEQ ID NO: 3920. In certain embodiments, the amino acid sequence of the stress protein consists of the amino acid sequence of SEQ ID NO: 3920. In certain embodiments, the stress protein is Hsp70 (e.g., human Hsp70). In certain embodiments, the stress protein (e.g., human hsc70) is a recombinant protein.

[0104] Amino acid sequences and nucleotide sequences of naturally occurring HSPs are generally available in sequence databases, such as GenBank. For example, Homo sapiens heat shock protein HSP70 (Heat Shock 70 kDa Protein 1A) has the following identifiers HGNC: 5232; Entrez Gene: 3303; Ensembl: ENSG00000204389; OMIM: 140550; UniProtKB: P08107 and NCBI Reference Sequence: NM_005345.5. Computer programs, such as Entrez, can be used to browse the database, and retrieve any amino acid sequence and genetic sequence data of interest by accession number. These databases can also be searched to identify sequences with various degrees of similarities to a query sequence using programs, such as FASTA and BLAST, which rank the similar sequences by alignment scores and statistics. Nucleotide sequences of non-limiting examples of HSPs that can be used for preparation of the HSP peptide-binding fragments disclosed herein are as follows: human Hsp70, Genbank Accession No. NM_005345, Sargent et al., 1989, Proc. Natl. Acad. Sci. U.S.A., 86:1968-1972; human Hsc70: Genbank Accession Nos. P11142, Y00371; human Hsp90, Genbank Accession No. X15183, Yamazaki et al., Nucl. Acids Res. 17:7108; human gp96: Genbank Accession No. X15187, Maki et al., 1990, Proc. Natl. Acad Sci., 87: 5658-5562; human BiP: Genbank Accession No. M19645; Ting et al., 1988, DNA 7: 275-286; human Hsp27, Genbank Accession No. M24743; Hickey et al., 1986, Nucleic Acids Res. 14:4127-45; mouse Hsp70: Genbank Accession No. M35021, Hunt et al., 1990, Gene, 87:199-204; mouse gp96: Genbank Accession No. M16370, Srivastava et al., 1987, Proc. Natl. Acad. Sci., 85:3807-3811; and mouse BiP: Genbank Accession No. U16277, Haas et al., 1988, Proc. Natl. Acad. Sci. U.S.A., 85: 2250-2254 (each of these references is incorporated herein by reference in its entirety).

[0105] In addition to the major stress protein families described above, an endoplasmic reticulum resident protein, calreticulin, has also been identified as yet another heat shock protein useful for eliciting an immune response when complexed to antigenic molecules (Basu and Srivastava, 1999, J. Exp. Med. 189:797-202; incorporated herein by reference in its entirety). Other stress proteins that can be used in the invention include grp78 (or BiP), protein disulfide isomerase (PDI), hsp110, and grp170 (Lin et al., 1993, Mol. Biol. Cell, 4:1109-1119; Wang et al., 2001, J. Immunol., 165:490-497, each of which is incorporated herein by reference in its entirety). Many members of these families were found subsequently to be induced in response to other stressful stimuli including nutrient deprivation, metabolic disruption, oxygen radicals, hypoxia and infection with intracellular pathogens (see Welch, May 1993, Scientific American 56-64; Young, 1990, Annu. Rev. Immunol. 8:401-420; Craig, 1993, Science 260:1902-1903; Gething, et al., 1992, Nature 355:33-45; and Lindquist, et al., 1988, Annu. Rev. Genetics 22:631-677, each of which is incorporated herein by reference in its entirety). It is contemplated that HSPs/stress proteins belonging to all of these families can be used in the practice disclosed herein. In certain embodiments, a stress protein encompasses any chaperone protein that facilitates peptide-MHC presentation. Suitable chaperone proteins include, but are not limited to, ER chaperones and tapasin (e.g., human tapasin).

[0106] The major stress proteins can accumulate to very high levels in stressed cells, but they occur at low to moderate levels in cells that have not been stressed. For example, the highly inducible mammalian hsp70 is hardly detectable at normal temperatures but becomes one of the most actively synthesized proteins in the cell upon heat shock (Welch, et al., 1985, J. Cell. Biol. 101:1198-1211, incorporated herein by reference in its entirety). In contrast, hsp90 and hsp60 proteins are abundant at normal temperatures in most, but not all, mammalian cells and are further induced by heat (Lai, et al., 1984, Mol. Cell. Biol. 4:2802-10; van Bergen en Henegouwen, et al., 1987, Genes Dev. 1:525-31, each of which is incorporated herein by reference in its entirety).

[0107] In various embodiments, nucleotide sequences encoding heat shock protein within a family or variants of a heat shock protein can be identified and obtained by hybridization with a probe comprising nucleotide sequence encoding an HSP under conditions of low to medium stringency. By way of example, procedures using such conditions of low stringency are as follows (see also Shilo and Weinberg, 1981, Proc. Natl. Acad. Sci. USA 78:6789-6792). Filters containing DNA are pretreated for 6 h at 40° C. in a solution containing 35% formamide, 5×SSC, 50 mM Tris-HCl (pH 7.5), 5 mM EDTA, 0.1% PVP, 0.1% Ficoll, 1% BSA, and 500 μg/ml denatured salmon sperm DNA. Hybridizations are carried out in the same solution with the following modifications: 0.02% PVP, 0.02% Ficoll, 0.2% BSA, 100 μg/ml salmon sperm DNA, 10% (wt/vol) dextran sulfate. Filters are incubated in hybridization mixture for 18-20 h at 40° C., and then washed for 1.5 h at 55° C. in a solution containing 2×SSC, 25 mM Tris-HCl (pH 7.4), 5 mM EDTA, and 0.1% SDS. The wash solution is replaced with fresh solution and incubated an additional 1.5 h at 60° C. Filters are blotted dry and exposed for signal detection. If necessary, filters are washed for a third time at 65-68° C. before signal detection. Other conditions of low stringency which may be used are well known in the art (e.g., as used for cross-species hybridizations).

[0108] Where stress proteins are used, peptide-binding fragments of stress proteins and functionally active derivatives, analogs, and variants thereof can also be used. Accordingly, in certain embodiments, the stress protein is a full-length HSP. In certain embodiments, the stress protein is a polypeptide comprising a domain of an HSP (e.g., a member of the Hsp60, Hsp70, or Hsp90 family, such as Hsc70, particularly human Hsc70), wherein the domain is capable of being noncovalently associated with a peptide (e.g., an HSP-binding peptide as described herein) to form a complex and optionally eliciting an immune response, and wherein the stress protein is not a full-length HSP.

[0109] In certain embodiments, the stress protein is a polypeptide that is capable of being noncovalently associated with a peptide (e.g., an HSP-binding peptide as described herein) to form a complex and optionally eliciting an immune response, wherein the stress protein shares a high degree of sequence similarity with a wild-type HSP (e.g., a member of the Hsp60, Hsp70, or Hsp90 family, such as Hsc70, particularly human Hsc70). To determine a region of identity between two amino acid sequences or nucleic acid sequences, the sequences are aligned for optimal comparison purposes (e.g., gaps can be introduced in the sequence of a first amino acid or nucleic acid sequence for optimal alignment with a second amino or nucleic acid sequence). The amino acid residues or nucleotides at corresponding amino acid positions or nucleotide positions are then compared. When a position in the first sequence is occupied by the same amino acid residue or nucleotide as the corresponding position in the second sequence, then the molecules are identical at that position. The percent identity between the two sequences is a function of the number of identical positions shared by the sequences (i.e., % identity=number of identical overlapping positions/total number of positions×100%). In one embodiment, the two sequences are the same length.

[0110] The determination of percent identity between two sequences can also be accomplished using a mathematical algorithm. A non-limiting example of a mathematical algorithm utilized for the comparison of two sequences is the algorithm of Karlin and Altschul, 1990, Proc. Natl. Acad. Sci. USA 87:2264-2268, modified as in Karlin and Altschul, 1993, Proc. Natl. Acad. Sci. USA 90:5873-5877 (each of which is incorporated herein by reference in its entirety). Such an algorithm is incorporated into the NBLAST and XBLAST programs of Altschul, et al., 1990, J. Mol. Biol. 215:403-410 (incorporated herein by reference in its entirety). BLAST nucleotide searches can be performed with the NBLAST program, e.g., score=100, wordlength=12 to obtain nucleotide sequences homologous to a nucleic acid molecule disclosed herein. BLAST protein searches can be performed with the XBLAST program, e.g., score=50, wordlength=3 to obtain amino acid sequences homologous to a protein molecule disclosed herein. To obtain gapped alignments for comparison purposes, Gapped BLAST can be utilized as described in Altschul et al., 1997, Nucleic Acids Res. 25:3389-3402. Alternatively, PSI-Blast can be used to perform an iterated search which detects distant relationships between molecules (Altschul et al., 1997, supra). When utilizing BLAST, Gapped BLAST, and PSI-Blast programs, the default parameters of the respective programs (e.g., XBLAST and NBLAST) can be used. Another example of a mathematical algorithm utilized for the comparison of sequences is the algorithm of Myers and Miller, 1988, CABIOS 4:11-17. Such an algorithm is incorporated into the ALIGN program (version 2.0) which is part of the GCG sequence alignment software package. When utilizing the ALIGN program for comparing amino acid sequences, a PAM120 weight residue table, a gap length penalty of 12, and a gap penalty of 4 can be used. The percent identity between two sequences can be determined using techniques similar to those described above, with or without allowing gaps. In calculating percent identity, typically only exact matches are counted.

[0111] In certain embodiments, isolated peptide-binding domains of a stress protein (e.g., Hsp70 or Hsc70) are employed. These peptide-binding domains can be identified by computer modeling of the three-dimensional structure of the peptide-binding site of a stress protein (e.g., Hsp70 and Hsc70). See for example, the peptide-binding fragments of HSPs disclosed in United States patent publication US 2001/0034042 (incorporated herein by reference in its entirety).

[0112] In certain embodiments, the stress protein is a mutated stress protein which has an affinity for a target polypeptide that is greater than a native stress protein. Such mutated stress proteins can be useful when the target polypeptide is phosphorylated or is a phosphopeptide mimetic (such as non-hydrolyzable analogs) or has some other post-translational modification.

[0113] The stress proteins can be prepared by purification from tissues, or by recombinant DNA techniques. HSPs can be purified from tissues in the presence of ATP or under acidic conditions (pH 1 to pH 6.9), for subsequent in vitro complexing to one or more polypeptides. See Peng, et al., 1997, J. Immunol. Methods, 204:13-21; Li and Srivastava, 1993, EMBO J. 12:3143-3151 (each of these references is incorporated herein by reference in its entirety). “Purified” stress proteins are substantially free of materials that are associated with the proteins in a cell, in a cell extract, in a cell culture medium, or in an individual. In certain embodiments, the stress protein purified from a tissue is a mixture of different HSPs, for example, hsp70 and hsc70.

[0114] Using the defined amino acid or cDNA sequences of a given HSP or a peptide-binding domain thereof, one can make a genetic construct which is transfected into and expressed in a host cell. The recombinant host cells may contain one or more copies of a nucleic acid sequence comprising a sequence that encodes an HSP or a peptide-binding fragment, operably linked with regulatory region(s) that drives the expression of the HSP nucleic acid sequence in the host cell. Recombinant DNA techniques can be readily utilized to generate recombinant HSP genes or fragments of HSP genes, and standard techniques can be used to express such HSP gene fragments. Any nucleic acid sequence encoding an HSP peptide-binding domain, including cDNA and genomic DNA, can be used to prepare the HSPs or peptide-binding fragments disclosed herein. The nucleic acid sequence can be wild-type or a codon-optimized variant that encodes the same amino acid sequence. An HSP gene fragment containing the peptide-binding domain can be inserted into an appropriate cloning vector and introduced into host cells so that many copies of the gene sequence are generated. A large number of vector-host systems known in the art may be used such as, but not limited to, bacteriophages such as lambda derivatives, or plasmids such as pBR322, pUC plasmid derivatives, the Bluescript vectors (Stratagene) or the pET series of vectors (Novagen). Any technique for mutagenesis known in the art can be used to modify individual nucleotides in a DNA sequence, for purpose of making amino acid substitution(s) in the expressed peptide sequence, or for creating/deleting restriction sites to facilitate further manipulations.

[0115] The stress proteins may be expressed as fusion proteins to facilitate recovery and purification from the cells in which they are expressed. For example, the stress proteins may contain a signal sequence leader peptide to direct its translocation across the endoplasmic reticulum membrane for secretion into culture medium. Further, the stress protein may contain an affinity label fused to any portion of the protein not involved in binding to a target polypeptide, for example, the carboxyl terminus. The affinity label can be used to facilitate purification of the protein, by binding to an affinity partner molecule. A variety of affinity labels known in the art may be used, non-limiting examples of which include the immunoglobulin constant regions, polyhistidine sequence (Petty, 1996, Metal-chelate affinity chromatography, in Current Protocols in Molecular Biology, Vol. 2, Ed. Ausubel et al., Greene Publish. Assoc. & Wiley Interscience, incorporated herein by reference in its entirety), glutathione S-transferase (GST; Smith, 1993, Methods Mol. Cell Bio. 4:220-229, incorporated herein by reference in its entirety), the E. coli maltose binding protein (Guan et al., 1987, Gene 67:21-30, incorporated herein by reference in its entirety), and various cellulose binding domains (U.S. Pat. Nos. 5,496,934; 5,202,247; 5,137,819; Tomme et al., 1994, Protein Eng. 7:117-123, each of which is incorporated herein by reference in its entirety).

[0116] Such recombinant stress proteins can be assayed for peptide binding activity (see, e.g., Klappa et al., 1998, EMBO J., 17:927-935, incorporated herein by reference in its entirety) for their ability to elicit an immune response. In certain embodiments, the recombinant stress protein produced in the host cell is of the same species as the intended recipient of the immunogenic composition (e.g., human).

[0117] The stress protein may be bound to the polypeptide(s) non-covalently or covalently. In certain embodiments, the stress protein is non-covalently bound to the polypeptide. Methods of preparing such complexes are set forth infra.

[0118] The molar ratio of total polypeptide(s) to total stress protein(s) can be any ratio from about 0.01:1 to about 100:1, including but not limited to about 0.01:1, 0.02:1, 0.05:1. 0.1:1. 0.2:1, 0.5:1, 1:1, 1.5:1, 2:1, 2.5:1, 3:1, 4:1, 5:1, 6:1, 7:1, 8:1, 9:1, 10:1, 11:1, 12:1, 13:1, 14:1, 15:1, 16:1, 17:1, 18:1, 19:1, 20:1, 30:1, 40:1, 49:1, up to 100:1. In certain embodiments, the composition comprises a plurality of complexes each comprising a polypeptide disclosed herein and a stress protein, wherein the molar ratio of the polypeptide to the stress protein in each complex is at least about 1:1 (e.g., about 1.5:1, 2:1, 2.5:1, 3:1, 4:1, 5:1, 6:1, 7:1, 8:1, 9:1, 10:1, 11:1, 12:1, 13:1, 14:1, 15:1, 16:1, 17:1, 18:1, 19:1, 20:1, 30:1, 40:1, 49:1, up to 100:1).

[0119] In certain embodiments, the molar ratio of total polypeptide(s) to total stress protein(s) is about 0.5:1 to 5:1. In certain embodiments, the molar ratio of total polypeptide(s) to total stress protein(s) is about 1:1 to 2:1. In certain embodiments, the molar ratio of total polypeptide(s) to total stress protein(s) is about 1:1, 1.25:1, 1.5:1, 2:1, 2.5:1, 3:1, 3.5:1, 4:1, 4.5:1, or 5:1. Such ratios, particularly the ratios close to 1:1, are advantageous in that the composition does not comprise a great excess of free peptide(s) that is not bound to a stress protein. Since many antigenic peptides comprising MHC-binding peptides tend to comprise hydrophobic regions, an excess amount of free peptide(s) may tend to aggregate during preparation and storage of the composition. Substantial complexation with a stress protein at a molar ratio of total polypeptide(s) to total stress protein(s) close to 1:1 (e.g., 1:1, 1.25:1, 1.5:1, or 2:1) is enabled by a high binding affinity of the polypeptide to the stress protein. Accordingly, in certain embodiments, the polypeptide binds to an HSP (e.g., Hsc70, Hsp70, Hsp90, Hsp110, Grp170, Gp96, or Calreticulin) with a K_{d} lower than 10⁻³ M, 10⁻⁴ M, 10⁻⁵ M, 10⁻⁶ M, 10⁻⁷ M, 10⁻⁸ M, or 10⁻⁹ M. In certain embodiments, the polypeptide binds to Hsc70 (e.g., human Hsc70) with a K_{d} of 10⁻³ M, 10⁻⁴ M, 10⁻⁵ M, 10⁻⁶ M, 10⁻⁷ M, 10⁻⁸ M, 10⁻⁹ M, or lower.

[0120] In certain embodiments, at least 40%, 45%, 50%, 55%, 60%, 65%, 70%, 75%, 80%, 85%, 90%, or 95% of the stress protein binds to the polypeptide in the composition. In certain embodiments, substantially all of the stress protein binds to the polypeptide in the composition.

[0121] Any number of different polypeptides can be included in a single composition as disclosed herein. In certain embodiments, the compositions comprise no more than 100 different polypeptides, e.g., 2-50, 2-30, 2-20, 5-20, 5-15, 5-10, or 10-15 different polypeptides.

[0122] In certain embodiments, each of the antigenic polypeptides comprises the same HSP-binding peptide and a different antigenic peptide. In certain embodiments, the composition comprises a single stress protein, wherein the stress protein is capable of binding to the HSP-binding peptide.

[0123] Pharmaceutical compositions comprising the complexes of stress proteins and antigenic polypeptides disclosed herein can be formulated to contain one or more pharmaceutically acceptable carriers or excipients including bulking agents, stabilizing agents, buffering agents, sodium chloride, calcium salts, surfactants, antioxidants, chelating agents, other excipients, and combinations thereof.

[0124] Bulking agents are preferred in the preparation of lyophilized formulations of the composition. Such bulking agents form the crystalline portion of the lyophilized product and may be selected from the group consisting of mannitol, glycine, alanine, and hydroxyethyl starch (HES).

[0125] Stabilizing agents may be selected from the group consisting of sucrose, trehalose, raffinose, and arginine. These agents are preferably present in amounts between 1-4%. Sodium chloride can be included in the present formulations preferably in an amount of 100-300 mM, or if used without the aforementioned bulking agents, can be included in the formulations in an amount of between 300-500 mM NaCl. Calcium salts include calcium chloride, calcium gluconate, calcium glubionate, or calcium gluceptate.

[0126] Buffering agents can be any physiologically acceptable chemical entity or combination of chemical entities which have a capacity to act as buffers, including but not limited to histidine, potassium phosphate, TRIS [tris-(hydroxymethyl)-aminomethane], BIS-Tris Propane (1,3-bis-[tris-(hydroxymethyl)methylamino]-propane), PIPES [piperazine-N,N′-bis-(2-ethanesulfonic acid)], MOPS [3-(N-morpholino)ethanesulfonic acid], HEPES (N-2-hydroxyethyl-piperazine-N′-2-ethanesulfonic acid), MES [2-(N-morpholino)ethanesulfonic acid], and ACES (N-2-acetamido-2-aminoethanesulfonic acid). Typically, the buffering agent is included in a concentration of 10-50 mM. Specific examples of base buffers include (i) PBS; (ii) 10 mM KPO₄, 150 mM NaCl; (iii) 10 mM HEPES, 150 mM NaCl; (iv) 10 mM imidazole, 150 mM NaCl; and (v) 20 mM sodium citrate. Excipients that can be used include (i) glycerol (10%, 20%); (ii) Tween 50 (0.05%, 0.005%); (iii) 9% sucrose; (iv) 20% sorbitol; (v) 10 mM lysine; or (vi) 0.01 mM dextran sulfate.

[0127] Surfactants, if present, are preferably in a concentration of 0.1% or less, and may be chosen from the group including but not limited to polysorbate 20, polysorbate 80, pluronic polyols, and BRIJ 35 (polyoxyethylene 23 laurel ether). Antioxidants, if used, must be compatible for use with a pharmaceutical preparation, and are preferably water soluble. Suitable antioxidants include homocysteine, glutathione, lipoic acid, 6-hydroxy-2,5,7,8-tetramethylchroman-2-carboxylic acid (Trolox), methionine, sodium thiosulfate, platinum, glycine-glycine-histidine (tripeptide), and butylatedhydroxytoluene (BHT). Chelating agents should preferably bind metals such as copper and iron with greater affinity than calcium, if a calcium salt is being used in the composition. An exemplary chelator is deferoxamine.

[0128] Many formulations known in the art can be used. For example, U.S. Pat. No. 5,763,401 describes a therapeutic formulation, comprising 15-60 mM sucrose, up to 50 mM NaCl, up to 5 mM calcium chloride, 65-400 mM glycine, and up to 50 mM histidine. In some embodiments, the therapeutic formulation is a solution of 9% sucrose in potassium phosphate buffer.

[0129] U.S. Pat. No. 5,733,873 (incorporated herein by reference in its entirety) discloses formulations which include between 0.01-1 mg/ml of a surfactant. This patent discloses formulations having the following ranges of excipients: polysorbate 20 or 80 in an amount of at least 0.01 mg/ml, preferably 0.02-1.0 mg/ml; at least 0.1 M NaCl; at least 0.5 mM calcium salt; and at least 1 mM histidine. More particularly, the following specific formulations are also disclosed: (1) 14.7-50-65 mM histidine, 0.31-0.6 M NaCl, 4 mM calcium chloride, 0.001-0.02-0.025% polysorbate 80, with or without 0.1% PEG 4000 or 19.9 mM sucrose; and (2) 20 mg/ml mannitol, 2.67 mg/ml histidine, 18 mg/ml NaCl, 3.7 mM calcium chloride, and 0.23 mg/ml polysorbate 80.

[0130] The use of low or high concentrations of sodium chloride has been described, for example U.S. Pat. No. 4,877,608 (incorporated herein by reference in its entirety) teaches formulations with relatively low concentrations of sodium chloride, such as formulations comprising 0.5 mM-15 mM NaCl, 5 mM calcium chloride, 0.2 mM-5 mM histidine, 0.01-10 mM lysine hydrochloride and up to 10% maltose, 10% sucrose, or 5% mannitol.

[0131] U.S. Pat. No. 5,605,884 (incorporated herein by reference in its entirety) teaches the use of formulations with relatively high concentrations of sodium chloride. These formulations include 0.35 M-1.2 M NaCl, 1.5-40 mM calcium chloride, 1 mM-50 mM histidine, and up to 10% sugar such as mannitol, sucrose, or maltose. A formulation comprising 0.45 M NaCl, 2.3 mM calcium chloride, and 1.4 mM histidine is exemplified.

[0132] International Patent Application WO 96/22107 (incorporated herein by reference in its entirety) describes formulations which include the sugar trehalose, for example formulations comprising: (1) 0.1 M NaCl, 15 mM calcium chloride, 15 mM histidine, and 1.27 M (48%) trehalose; or (2) 0.011% calcium chloride, 0.12% histidine, 0.002% TRIS, 0.002% Tween 80, 0.004% PEG 3350, 7.5% trehalose; and either 0.13% or 1.03% NaCl.

[0133] U.S. Pat. No. 5,328,694 (incorporated herein by reference in its entirety) describes a formulation which includes 100-650 mM disaccharide and 100 mM-1.0 M amino acid, for example (1) 0.9 M sucrose, 0.25 M glycine, 0.25 M lysine, and 3 mM calcium chloride; and (2) 0.7 M sucrose, 0.5 M glycine, and 5 mM calcium chloride. Pharmaceutical compositions can be optionally prepared as lyophilized product, which may then be formulated for oral administration or reconstituted to a liquid form for parenteral administration.

[0134] In certain embodiments, the composition stimulates a T-cell response against a cell expressing or displaying a polypeptide comprising one or more of the MHC-binding peptides in a subject to whom the composition is administered. The cell expressing the polypeptide may be a cell comprising a polynucleotide encoding the polypeptide, wherein the polynucleotide is in the genome of the cell, in an episomal vector, or in the genome of a virus that has infected the cell. The cell displaying the polypeptide may not comprise a polynucleotide encoding the polypeptide, and may be produced by contacting the cell with the polypeptide or a derivative thereof.

[0135] In certain embodiments, the composition induces in vitro activation of T cells in peripheral blood mononuclear cells (PBMCs) isolated from a subject. The in vitro activation of T cells includes, without limitation, in vitro proliferation of T cells, production of cytokines (e.g., IFNγ) from T cells, and increased surface expression of activation markers (e.g., CD25, CD45RO) on T cells.

### 6.3.2 Preparation of Complexes of Antigenic Polypeptides and Stress Proteins

[0136] In another aspect, the instant disclosure provides a method of making complexes of antigenic polypeptides and stress proteins (e.g., for the purposes of making a vaccine), the method comprising mixing one or more antigenic polypeptides as disclosed herein with a purified stress protein in vitro under suitable conditions such that the purified stress protein binds to at least one of the antigenic polypeptides. The method is also referred to as a complexing reaction herein. In certain embodiments, two or more purified stress proteins are employed, wherein each purified stress protein binds to at least one of the antigenic polypeptides. In certain embodiments, at least a portion of the purified stress protein binds to the antigenic polypeptide in the composition.

[0137] The stress protein may be bound to the polypeptide non-covalently or covalently. In certain embodiments, the stress protein is non-covalently bound to the polypeptide. In various embodiments, the complexes formed in vitro are optionally purified. Purified complexes of stress proteins and polypeptides are substantially free of materials that are associated with such complexes in a cell, or in a cell extract. Where purified stress proteins and purified polypeptides are used in an in vitro complexing reaction, the term “purified complex(es)” does not exclude a composition that also comprises free stress proteins and conjugates or peptides not in complexes.

[0138] Any stress proteins described supra may be employed in the method disclosed herein. In certain embodiments, the stress protein is selected from the group consisting of Hsc70, Hsp70, Hsp90, Hsp110, Grp170, Gp96, Calreticulin, a mutant thereof, and combinations of two or more thereof. In one embodiment, the stress protein is an Hsc70, e.g., a human Hsc70. In another embodiment, the stress protein is an Hsp70, e.g., a human Hsp70. In certain embodiments, the stress protein (e.g., human Hsc70 or human Hsp70) is a recombinant protein.

[0139] Prior to complexing, HSPs can be pretreated with ATP or exposed to acidic conditions to remove any peptides that may be non-covalently associated with the HSP of interest. Acidic conditions are any pH levels below pH 7, including the ranges pH 1-pH 2, pH 2-pH 3, pH 3-pH 4, pH 4-pH 5, pH 5-pH 6, and pH 6-pH 6.9. When the ATP procedure is used, excess ATP is removed from the preparation by the addition of apyranase as described by Levy, et al., 1991, Cell 67:265-274 (incorporated herein by reference in its entirety). When acidic conditions are used, the buffer is readjusted to neutral pH by the addition of pH modifying reagents.

[0140] In certain embodiments, prior to complexation with purified stress proteins, the polypeptides may be reconstituted from powder in 100% DMSO. Equimolar amounts of the peptides may then be pooled in a solution of 75% DMSO diluted in sterile water.

[0141] In certain embodiments, prior to complexation with purified stress proteins, the polypeptides may be reconstituted in neutral water.

[0142] In certain embodiments, prior to complexation with purified stress proteins, the polypeptides may be reconstituted in acidic water containing HCl.

[0143] In certain embodiments, prior to complexation with purified stress proteins, the polypeptides may be reconstituted in basic water containing NaOH.

[0144] In certain embodiments, prior to complexation with purified stress proteins, the solubility of each polypeptide in water may be tested. If a polypeptide is soluble in neutral water, neutral water may be used as a solvent for the polypeptide. If the polypeptide is not soluble in neutral water, solubility in acidic water containing HCl, or another acid, e.g., acetic acid, phosphoric acid, or sulfuric acid may be tested. If the polypeptide is soluble in acidic water containing HCl (or another acid), acidic water containing HCl (or another acid) may be used as the solvent for the polypeptide. If the polypeptide is not soluble in acidic water containing HCl (or another acid), solubility in basic water containing NaOH may be tested. If the polypeptide is soluble in basic water containing NaOH, basic water containing NaOH may be used as the solvent for the polypeptide. If the polypeptide is not soluble in basic water containing NaOH, the polypeptide may be dissolved in DMSO. If the polypeptide is not soluble in DMSO the polypeptide may be excluded. The dissolved polypeptides may then be mixed to make a pool of polypeptides. The dissolved polypeptides may be mixed at equal volume. The dissolved polypeptides may be mixed in equimolar amounts.

[0145] The molar ratio of total polypeptide(s) to total stress protein(s) can be any ratio from 0.01:1 to 100:1, including but not limited to 0.01:1, 0.02:1, 0.05:1. 0.1:1. 0.2:1, 0.5:1, 1:1, 1.5:1, 2:1, 2.5:1, 3:1, 4:1, 5:1, 6:1, 7:1, 8:1, 9:1, 10:1, 11:1, 12:1, 13:1, 14:1, 15:1, 16:1, 17:1, 18:1, 19:1, 20:1, 30:1, 40:1, 49:1, up to 100:1. In certain embodiments, the composition to be prepared comprises a plurality of complexes each comprising a polypeptide disclosed herein and a stress protein, and the complexing reaction comprises mixing the polypeptides with the stress proteins, wherein the molar ratio of the polypeptide to the stress protein in each complex is at least 1:1 (e.g., about 2:1, 3:1, 4:1, 5:1, 6:1, 7:1, 8:1, 9:1, 10:1, 11:1, 12:1, 13:1, 14:1, 15:1, 16:1, 17:1, 18:1, 19:1, 20:1, 30:1, 40:1, 49:1, up to 100:1).

[0146] In certain embodiments, the molar ratio of total polypeptide(s) to total stress protein(s) is about 0.5:1 to 5:1. In certain embodiments, the molar ratio of total polypeptide(s) to total stress protein(s) is about 1:1 to 2:1. In certain embodiments, the molar ratio of total polypeptide(s) to total stress protein(s) is about 1:1, 1.25:1, 1.5:1, 2:1, 2.5:1, 3:1, 3.5:1, 4:1, 4.5:1, or 5:1. Such ratios, particularly the ratios close to 1:1, are advantageous in that the composition does not comprise a great excess of free peptide(s) that is not bound to a stress protein. Since many antigenic peptides comprising MHC-binding peptides tend to comprise hydrophobic regions, an excess amount of free peptide(s) may tend to aggregate during preparation and storage of the composition. Substantial complexation with a stress protein at a molar ratio of total polypeptide(s) to total stress protein(s) close to 1:1 (e.g., 1:1, 1.25:1, 1.5:1, or 2:1) is enabled by a high binding affinity of the polypeptide to the stress protein. Accordingly, in certain embodiments, the polypeptide used in the complexing reaction binds to an HSP (e.g., Hsc70, Hsp70, Hsp90, Hsp110, Grp170, Gp96, or Calreticulin) with a K_{d} lower than 10⁻³ M, 10⁻⁴ M, 10⁻⁵ M, 10⁻⁶ M, 10⁻⁷ M, 10⁻⁸ M, or 10⁻⁹ M. In certain embodiments, the polypeptide binds to Hsc70 (e.g., human Hsc70) with a K_{d} of 10⁻³ M, 10⁻⁴ M, 10⁻⁵ M, 10⁻⁶ M, 10⁻⁷ M, 10⁻⁸ M, 10⁻⁹ M, or lower.

[0147] The method disclosed herein can be used to prepare a composition (e.g., a pharmaceutical composition) in bulk (e.g., greater than or equal to 30 mg, 50 mg, 100 mg, 200 mg, 300 mg, 500 mg, or 1 g of total peptide and protein). The prepared composition can then be transferred to single-use or multi-use containers, or apportioned to unit dosage forms. Alternatively, the method disclosed herein can be used to prepare a composition (e.g., a pharmaceutical composition) in a small amount (e.g., less than or equal to 300 μg, 1 mg, 3 mg, 10 mg, 30 mg, or 100 mg of total peptide and protein). In certain embodiments, the composition is prepared for single use, optionally in a unit dosage form.

[0148] In certain embodiments, the total amount of the polypeptide(s) and stress protein in the composition is about 10 μg to 600 μg (e.g., about 50 μg, 100 μg, 200 μg, 300 μg, 400 μg, or 500 g, optionally about 120 μg, 240 μg, or 480 μg). In certain embodiments, the total amount of the polypeptide(s) and stress protein in the composition is about 300 μg. Amounts of the stress protein(s) and polypeptide(s) in a unit dosage form are disclosed infra.

[0149] An exemplary protocol for noncovalent complexing of a population of polypeptides to a stress protein in vitro is provided herein. The population of polypeptides can comprise a mixture of the different polypeptide species disclosed herein. Then, the mixture is incubated with the purified and/or pretreated stress protein for from 15 minutes to 3 hours (e.g., 1 hour) at from 4° to 50° C. (e.g., 37° C.) in a suitable binding buffer, such as phosphate buffered saline pH 7.4 optionally supplemented with 0.01% Polysorbate 20; a buffer comprising 9% sucrose in potassium phosphate buffer; a buffer comprising 2.7 mM Sodium Phosphate Dibasic, 1.5 mM Potassium Phosphate Monobasic, 150 mM NaCl, pH 7.2; a buffer containing 20 mM sodium phosphate, pH 7.2-7.5, 350-500 mM NaCl, 3 mM MgCl₂ and 1 mM phenyl methyl sulfonyl fluoride (PMSF); and the buffer optionally comprising 1 mM ADP. Any buffer may be used that is compatible with the stress protein. The preparations are then optionally purified by centrifugation through a Centricon 10 assembly (Millipore; Billerica, Mass.) to remove any unbound peptide. The non-covalent association of the proteins/peptides with the HSPs can be assayed by High Performance Liquid Chromatography (HPLC), Mass Spectrometry (MS), mixed lymphocyte target cell assay (MLTC), or enzyme-linked immunospot (ELISPOT) assay (Taguchi T, et al., J Immunol Methods 1990; 128: 65-73, incorporated herein by reference in its entirety). Once the complexes have been isolated and diluted, they can be optionally characterized further in animal models using the administration protocols and excipients described herein (see, e.g., Example 2 infra).

[0150] Complexes of stress proteins and antigenic polypeptides from separate covalent and/or non-covalent complexing reactions can be prepared to form a composition before administration to a subject. In certain embodiments, the composition is prepared within 1, 2, 3, 4, 5, 6, or 7 days before administration to a subject. In certain embodiments, the composition is prepared within 1, 2, 3, 4, 5, 6, 7, or 8 weeks before administration to a subject. In certain embodiments, the composition is prepared within 1, 2, 3, 4, 5, 6, 7, 8, 9, 10, 11, or 12 months before administration to a subject. The composition can optionally be stored at about 4° C., −20° C., or −80° C. after preparation and before use.

[0151] In certain embodiments, the complexes prepared by the method disclosed herein are mixed with an adjuvant at bedside just prior to administration to a patient. In certain embodiments, the adjuvant comprises a saponin or an immunostimulatory nucleic acid. In certain embodiments, the adjuvant comprises QS-21. In certain embodiments, the dose of QS-21 is 10 μg, 25 μg, 50 μg, 75 μg, 100 μg, 125 μg, 150 μg, 175 μg, or 200 ag. In certain embodiments, the dose of QS-21 is about 100 μg. In certain embodiments, the adjuvant comprises a TLR agonist. In certain embodiments, the TLR agonist is an agonist of TLR4. In certain embodiments, the TLR agonist is an agonist of TLR7 and/or TLR8. In certain embodiments, the TLR agonist is an agonist of TLR9. In certain embodiments, the TLR agonist is an agonist of TLR5.

[0152] As an alternative to making non-covalent complexes of stress proteins and polypeptides, the polypeptides can be covalently attached to stress proteins, e.g., by chemical crosslinking or UV crosslinking. Any chemical crosslinking or UV crosslinking methods known in the art (see, e.g., Wong, 1991, Chemistry of Protein Conjugation and Cross-Linking, CRC Press, incorporated herein by reference in its entirety) can be employed. For example, glutaraldehyde crosslinking (see, e.g., Barrios et al., 1992, Eur. J. Immunol. 22: 1365-1372, incorporated herein by reference in its entirety) may be used. In an exemplary protocol, 1-2 mg of HSP-peptide complex is cross-linked in the presence of 0.002% glutaraldehyde for 2 hours. Glutaraldehyde is removed by dialysis against phosphate buffered saline (PBS) overnight (Lussow et al., 1991, Eur. J. Immunol. 21: 2297-2302, incorporated herein by reference in its entirety).

### 6.3.3 Vaccines

[0153] In another aspect, the instant disclosure provides a vaccine comprising the antigenic polypeptide compositions disclosed herein. The vaccine may be prepared by any method that results in a stable, sterile, preferably injectable formulation.

[0154] In certain embodiments, the vaccine comprises one or more compositions disclosed herein and one or more adjuvants. A variety of adjuvants may be employed, including, for example, systemic adjuvants and mucosal adjuvants. A systemic adjuvant is an adjuvant that can be delivered parenterally. Systemic adjuvants include adjuvants that create a depot effect, adjuvants that stimulate the immune system, and adjuvants that do both.

[0155] An adjuvant that creates a depot effect is an adjuvant that causes the antigen to be slowly released in the body, thus prolonging the exposure of immune cells to the antigen. This class of adjuvants includes alum (e.g., aluminum hydroxide, aluminum phosphate); or emulsion-based formulations including mineral oil, non-mineral oil, water-in-oil or oil-in-water-in oil emulsion, oil-in-water emulsions such as Seppic ISA series of Montanide adjuvants (e.g., Montanide ISA 720, AirLiquide, Paris, France); MF-59 (a squalene-in-water emulsion stabilized with Span 85 and Tween 80; Chiron Corporation, Emeryville, Calif.; and PROVAX (an oil-in-water emulsion containing a stabilizing detergent and a micelle-forming agent; IDEC, Pharmaceuticals Corporation, San Diego, Calif.).

[0156] Other adjuvants stimulate the immune system, for instance, cause an immune cell to produce and secrete cytokines or IgG. This class of adjuvants includes immunostimulatory nucleic acids, such as CpG oligonucleotides; saponins purified from the bark of the Q. saponaria tree, such as QS-21; poly[di(carboxylatophenoxy)phosphazene (PCPP polymer; Virus Research Institute, USA); RNA mimetics such as polyinosinic:polycytidylic acid (poly I:C) or poly I:C stabilized with poly-lysine (poly-ICLC [Hiltonol®; Oncovir, Inc.]; derivatives of lipopolysaccharides (LPS) such as monophosphoryl lipid A (MPL; Ribi ImmunoChem Research, Inc., Hamilton, Mont.), muramyl dipeptide (MDP; Ribi) and threonyl-muramyl dipeptide (t-MDP; Ribi); OM-174 (a glucosamine disaccharide related to lipid A; OM Pharma SA, Meyrin, Switzerland); and Leishmania elongation factor (a purified Leishmania protein; Corixa Corporation, Seattle, Wash.).

[0157] Other systemic adjuvants are adjuvants that create a depot effect and stimulate the immune system. These compounds have both of the above-identified functions of systemic adjuvants. This class of adjuvants includes but is not limited to ISCOMs (Immunostimulating complexes which contain mixed saponins, lipids and form virus-sized particles with pores that can hold antigen; CSL, Melbourne, Australia); AS01 which is a liposome based formulation containing MPL and QS-21 (GlaxoSmithKline, Belgium); AS02 (GlaxoSmithKline, which is an oil-in-water emulsion containing MPL and QS-21: GlaxoSmithKline, Rixensart, Belgium); AS04 (GlaxoSmithKline, which contains alum and MPL; GSK, Belgium); AS15 which is a liposome based formulation containing CpG oligonucleotides, MPL and QS-21 (GlaxoSmithKline, Belgium); non-ionic block copolymers that form micelles such as CRL 1005 (these contain a linear chain of hydrophobic polyoxypropylene flanked by chains of polyoxyethylene; Vaxcel, Inc., Norcross, Ga.); and Syntex Adjuvant Formulation (SAF, an oil-in-water emulsion containing Tween 80 and a nonionic block copolymer; Syntex Chemicals, Inc., Boulder, Colo.).

[0158] The mucosal adjuvants useful according to the invention are adjuvants that are capable of inducing a mucosal immune response in a subject when administered to a mucosal surface in conjunction with complexes disclosed herein. Mucosal adjuvants include CpG nucleic acids (e.g. PCT published patent application WO 99/61056, incorporated herein by reference in its entirety), bacterial toxins: e.g., Cholera toxin (CT), CT derivatives including but not limited to CT B subunit (CTB); CTD53 (Val to Asp); CTK97 (Val to Lys); CTK104 (Tyr to Lys); CTD53/K63 (Val to Asp, Ser to Lys); CTH54 (Arg to His); CTN107 (His to Asn); CTE114 (Ser to Glu); CTE112K (Glu to Lys); CTS61F (Ser to Phe); CTS 106 (Pro to Lys); and CTK63 (Ser to Lys), Zonula occludens toxin (zot), Escherichia coli heat-labile enterotoxin, Labile Toxin (LT), LT derivatives including but not limited to LT B subunit (LTB); LT7K (Arg to Lys); LT61F (Ser to Phe); LT112K (Glu to Lys); LT118E (Gly to Glu); LT146E (Arg to Glu); LT192G (Arg to Gly); LTK63 (Ser to Lys); and LTR72 (Ala to Arg), Pertussis toxin, PT. including PT-9K/129G; Toxin derivatives (see below); Lipid A derivatives (e.g., monophosphoryl lipid A, MPL); Muramyl Dipeptide (MDP) derivatives; bacterial outer membrane proteins (e.g., outer surface protein A (OspA) lipoprotein of Borrelia burgdorferi, outer membrane protein of Neisseria meningitidis); oil-in-water emulsions (e.g., MF59; aluminum salts (Isaka et al., 1998, 1999); and Saponins (e.g., QS-21, e.g., QS-21 Stimulon®, Antigenics LLC, Lexington, Mass.), ISCOMs, MF-59 (a squalene-in-water emulsion stabilized with Span 85 and Tween 80; Chiron Corporation, Emeryville, Calif.); the Seppic ISA series of Montanide adjuvants (e.g., Montanide ISA 720; AirLiquide, Paris, France); PROVAX (an oil-in-water emulsion containing a stabilizing detergent and a micelle-forming agent; IDEC Pharmaceuticals Corporation, San Diego, Calif.); Syntext Adjuvant Formulation (SAF; Syntex Chemicals, Inc., Boulder, Colo.); poly[di(carboxylatophenoxy)]phosphazene (PCPP polymer; Virus Research Institute, USA) and Leishmania elongation factor (Corixa Corporation, Seattle, Wash.).

[0159] In certain embodiments, the adjuvant added to the compositions disclosed herein comprises a saponin and/or an immunostimulatory nucleic acid. In certain embodiments, the adjuvant added to the composition comprises or further comprises QS-21.

[0160] In certain embodiments, the adjuvant added to the compositions disclosed herein comprises a Toll-like receptor (TLR) agonist. In certain embodiments, the TLR agonist is an agonist of TLR4. In certain embodiments, the TLR agonist is an agonist of TLR7 and/or TLR8. In certain embodiments, the TLR agonist is an agonist of TLR9. In certain embodiments, the TLR agonist is an agonist of TLR5.

[0161] The compositions disclosed herein described herein may be combined with an adjuvant in several ways. For example, different polypeptides may be mixed together first to form a mixture and then complexed with stress protein(s) and/or adjuvant(s) to form a composition. As another example, different polypeptides may be complexed individually with a stress protein and/or adjuvant(s), and the resulting batches of complexes may then be mixed to form a composition.

[0162] The adjuvant can be administered prior to, during, or following administration of the compositions comprising complexes of stress protein and polypeptides. Administration of the adjuvant and the compositions can be at the same or different administration sites.

### 6.3.4 Unit Dosage Forms

[0163] In another aspect, the instant disclosure provides a unit dosage form of a composition (e.g., pharmaceutical composition or vaccine) disclosed herein.

[0164] The amounts and concentrations of the antigenic polypeptides, stress proteins, and/or adjuvants at which the efficacy of a vaccine disclosed herein is effective may vary depending on the chemical nature and the potency of the polypeptides, stress proteins, and/or adjuvants. Typically, the starting amounts and concentrations in the vaccine are the ones conventionally used for eliciting the desired immune response, using the conventional routes of administration, e.g., intramuscular injection. The amounts and concentrations of the peptides, conjugates, stress proteins, and/or adjuvants can then be adjusted, e.g., by dilution using a diluent, so that an effective immune response is achieved as assessed using standard methods known in the art (e.g., determined by the antibody or T-cell response to the vaccine relative to a control formulation).

[0165] In certain embodiments, the total amount of the polypeptides and stress protein in the composition is about 10 μg to 600 μg (e.g., about 50 μg, 100 μg, 200 μg, 300 μg, 400 μg, or 500 g, optionally about 120 μg, 240 μg, or 480 μg). In certain embodiments, the total amount of the polypeptides and stress protein in the composition is about 300 μg. In certain embodiments, the amount of the stress protein in the composition is about 250 μg to 290 μg.

[0166] In certain embodiments, the amount of the stress protein in the composition is about 10 μg to 600 μg (e.g., about 50 μg, 100 ag, 200 ag, 300 ag, 400 ag, or 500 ag, optionally about 120 μg, 240 μg, or 480 μg). In certain embodiments, the amount of the stress protein in the composition is about 300 μg. The amount of the polypeptide is calculated based on a designated molar ratio and the molecular weight of the polypeptides.

[0167] In certain embodiments, the total molar amount of the polypeptides in the unit dosage form of the composition is about 0.1 to 10 nmol (e.g., about 0.1 nmol, 0.5 nmol, 1 nmol, 2 nmol, 3 nmol, 4 nmol, 5 nmol, 6 nmol, 7 nmol, 8 nmol, 9 nmol, or 10 nmol). In certain embodiments, the total molar amount of the polypeptides in the unit dosage form of the composition is about 4 nmol. In certain embodiments, the total molar amount of the polypeptides in the unit dosage form of the composition is about 5 nmol.

[0168] The molar ratio of total polypeptides to total stress proteins can be any ratio from about 0.01:1 to about 100:1, including but not limited to about 0.01:1, 0.02:1, 0.05:1. 0.1:1. 0.2:1, 0.5:1, 1:1, 1.5:1, 2:1, 2.5:1, 3:1, 4:1, 5:1, 6:1, 7:1, 8:1, 9:1, 10:1, 11:1, 12:1, 13:1, 14:1, 15:1, 16:1, 17:1, 18:1, 19:1, 20:1, 30:1, 40:1, 49:1, up to 100:1. In certain embodiments, the composition comprises a plurality of complexes each comprising a polypeptide and a stress protein, wherein the molar ratio of the polypeptide to the stress protein in each complex is at least about 1:1 (e.g., about 1.5:1, 2:1, 2.5:1, 3:1, 4:1, 5:1, 6:1, 7:1, 8:1, 9:1, 10:1, 11:1, 12:1, 13:1, 14:1, 15:1, 16:1, 17:1, 18:1, 19:1, 20:1, 30:1, 40:1, 49:1, up to 100:1). In certain embodiments, the molar ratio of total polypeptide(s) to total stress protein(s) is about 0.5:1 to 5:1.

[0169] In certain embodiments, the molar ratio of total polypeptide(s) to total stress protein(s) is about 1:1 to 2:1. In certain embodiments, the molar ratio of total polypeptide(s) to total stress protein(s) is about 1:1, 1.25:1, or 1.5:1. Such ratios, particularly the ratios close to 1:1, are advantageous in that the composition does not comprise a great excess of free peptide(s) that is not bound to a stress protein. Since many antigenic peptides comprising MHC-binding peptides tend to comprise hydrophobic regions, an excess amount of free peptide(s) may tend to aggregate during preparation and storage of the composition. Substantial complexation with a stress protein at a molar ratio of total polypeptide(s) to total stress protein(s) close to 1:1 (e.g., 1:1, 1.25:1, 1.5:1, or 2:1) is enabled by a high binding affinity of the polypeptide to the stress protein. Accordingly, in certain embodiments, the polypeptide binds to an HSP (e.g., Hsc70, Hsp70, Hsp90, Hsp110, Grp170, Gp96, or Calreticulin) with a K_{d} lower than 10⁻³ M, 10⁻⁴ M, 10⁻⁵ M, 10⁻⁶ M, 10⁻⁷ M, 10⁻⁸ M, or 10⁻⁹ M. In certain embodiments, the polypeptide binds to Hsc70 (e.g., human Hsc70) with a K_{d} of 10⁻³ M, 10⁻⁴ M, 10⁻⁵ M, 10⁻⁶ M, 10⁻⁷ M, 10⁻⁸ M, 10⁻⁹ M, or lower.

[0170] Methods of calculating the amounts of components in the unit dosage form are provided. For example, in certain embodiments, the polypeptides have an average molecular weight of about 3 kD, and the molecular weight of Hsc70 is about 71 kD. Assuming in one embodiment that the total amount of the polypeptides and stress protein in the composition is 300 μg, and the molar ratio of the polypeptides to hsc70 is 1.5:1. The molar amount of Hsc70 can be calculated as 300 μg divided by 71 kD+1.5×3 kD, resulting in about 4.0 nmol, and the mass amount of Hsc70 can be calculated by multiplying the molar amount with 71 kD, resulting in about 280 kD. The total molar amount of the polypeptides can be calculated as 1.5×4.0 nmol, resulting in 6.0 nmol. If 10 different polypeptides are employed, the molar amount of each polypeptide is 0.60 nmol. Assuming in another embodiment that a 300 μg dose of Hsc70 is intended to be included in a unit dosage form, and the molar ratio of polypeptides to Hsc70 is 1.5:1. The total molar amount of the polypeptides can be calculated as 300 μg divided by 71 kD then times 1.5, resulting in 6.3 nmol. If 10 different polypeptides are employed, the molar amount of each polypeptide is 0.63 nmol. In cases where one or more of the variables are different from those in the examples, the quantities of the stress proteins and of the polypeptides are scaled accordingly.

[0171] It is further appreciated that the unit dosage form can optionally comprise one or more adjuvants as disclosed supra. In certain embodiments, the adjuvant comprises a saponin and/or an immunostimulatory nucleic acid. In certain embodiments, the adjuvant comprises or further comprises QS-21. In certain embodiments, the amount of QS-21 in the unit dosage form of composition is 10 μg, 25 μg, 50 μg, 75 μg, 100 μg, 125 μg, 150 μg, 175 μg, or 200 μg. In certain embodiments, the amount of QS-21 in the unit dosage form of composition is 100 μg. In certain embodiments, the adjuvant comprises a Toll-like receptor (TLR) agonist. In certain embodiments, the TLR agonist is an agonist of TLR4. In certain embodiments, the TLR agonist is an agonist of TLR7 and/or TLR8. In certain embodiments, the TLR agonist is an agonist of TLR9. In certain embodiments, the TLR agonist is an agonist of TLR5.

### 6.4 Methods of Use

[0172] The compositions (e.g., pharmaceutical compositions and vaccines, and unit dosage forms thereof) disclosed herein are particularly useful for inducing a cellular immune response. Stress proteins can deliver antigenic polypeptides through the cross-presentation pathway in antigen presenting cells (APCs) (e.g., macrophages and dendritic cells (DCs) via membrane receptors (mainly CD91) or by binding to Toll-like receptors, thereby leading to activation of CD8⁺ and CD4⁺ T cells. Internalization of a stress protein/antigenic polypeptide complex results in functional maturation of the APCs with chemokine and cytokine production leading to activation of natural killer cells (NK), monocytes and Th1 and Th-2-mediated immune responses.

[0173] Accordingly, in one aspect, the instant disclosure provides a method of inducing a cellular immune response to an antigenic peptide in a subject, the method comprising administering to the subject an effective amount of a composition as disclosed herein. In another aspect, the instant disclosure provides a method of treating a disease (e.g., cancer) in a subject, the method comprising administering to the subject an effective amount of a composition as disclosed herein. The compositions disclosed herein can also be used in preparing a medicament or vaccine for the treatment of a subject.

[0174] In various embodiments, such subjects can be an animal, e.g., a mammal, a non-human primate, and a human. The term “animal” includes companion animals, such as cats and dogs; zoo animals; wild animals, including deer, foxes and raccoons; farm animals, livestock and fowl, including horses, cattle, sheep, pigs, turkeys, ducks, and chickens, and laboratory animals, such as rodents, rabbits, and guinea pigs. In certain embodiments, the subject has cancer.

### 6.4.1 Treatment of Cancer

[0175] The compositions disclosed herein can be used alone or in combination with other therapies for the treatment of cancer. One or more of the MHC-binding peptides disclosed herein can be present in the subject's cancer cells. In certain embodiments, one or more of the MHC-binding peptides are common to or frequently found in the type and/or stage of the cancer. In certain embodiments, one or more MHC-binding peptides are found in greater than 5% of cancers. In certain embodiments, one or more of the MHC-binding peptides are specific to the cancer of the subject.

[0176] Cancers that can be treated using the compositions disclosed herein include, without limitation, a solid tumor, a hematological cancer (e.g., leukemia, lymphoma, myeloma, e.g., multiple myeloma), and a metastatic lesion. In one embodiment, the cancer is a solid tumor. Examples of solid tumors include malignancies, e.g., sarcomas and carcinomas, e.g., adenocarcinomas of the various organ systems, such as those affecting the lung, breast, ovarian, lymphoid, gastrointestinal (e.g., colon), anal, genitals and genitourinary tract (e.g., renal, urothelial, bladder cells, prostate), pharynx, CNS (e.g., brain, neural or glial cells), head and neck, skin (e.g., melanoma), and pancreas, as well as adenocarcinomas which include malignancies such as colon cancers, rectal cancer, renal-cell carcinoma, liver cancer, lung cancer (e.g., non-small cell lung cancer or small cell lung cancer), cancer of the small intestine and cancer of the esophagus. The cancer may be at an early, intermediate, late stage or metastatic cancer. In certain embodiments, the cancer is associated with elevated PD-1 activity (e.g., elevated PD-1 expression).

[0177] In one embodiment, the cancer is chosen from a lung cancer (e.g., lung adenocarcinoma or a non-small cell lung cancer (NSCLC) (e.g., a NSCLC with squamous and/or non-squamous histology, or a NSCLC adenocarcinoma)), a melanoma (e.g., an advanced melanoma), a renal cancer (e.g., a renal cell carcinoma), a liver cancer (e.g., hepatocellular carcinoma or intrahepatic cholangiocellular carcinoma), a myeloma (e.g., a multiple myeloma), a prostate cancer, a breast cancer (e.g., a breast cancer that does not express one, two or all of estrogen receptor, progesterone receptor, or Her2/neu, e.g., a triple negative breast cancer), an ovarian cancer, a colorectal cancer, a pancreatic cancer, a head and neck cancer (e.g., head and neck squamous cell carcinoma (HNSCC), anal cancer, gastro-esophageal cancer (e.g., esophageal squamous cell carcinoma), mesothelioma, nasopharyngeal cancer, thyroid cancer, cervical cancer, epithelial cancer, peritoneal cancer, or a lymphoproliferative disease (e.g., a post-transplant lymphoproliferative disease). In one embodiment, the cancer is NSCLC. In one embodiment, the cancer is a renal cell carcinoma. In one embodiment, the cancer is an ovarian cancer, optionally wherein the ovarian cancer is associated with human papillomavirus (HPV) infection. In a specific embodiment, the ovarian cancer is a platinum-refractory ovarian cancer.

[0178] In one embodiment, the cancer is a hematological cancer, for example, a leukemia, a lymphoma, or a myeloma. In one embodiment, the cancer is a leukemia, for example, acute lymphoblastic leukemia (ALL), acute myelogenous leukemia (AML), acute myeloblastic leukemia (AML), chronic lymphocytic leukemia (CLL), chronic myelogenous leukemia (CML), chronic myeloid leukemia (CML), chronic myelomonocytic leukemia (CMML), chronic lymphocytic leukemia (CLL), or hairy cell leukemia. In one embodiment, the cancer is a lymphoma, for example, B cell lymphoma, diffuse large B-cell lymphoma (DLBCL), activated B-cell like (ABC) diffuse large B cell lymphoma, germinal center B cell (GCB) diffuse large B cell lymphoma, mantle cell lymphoma, Hodgkin lymphoma, non-Hodgkin lymphoma, relapsed non-Hodgkin lymphoma, refractory non-Hodgkin lymphoma, recurrent follicular non-Hodgkin lymphoma, Burkitt lymphoma, small lymphocytic lymphoma, follicular lymphoma, lymphoplasmacytic lymphoma, or extranodal marginal zone lymphoma. In one embodiment the cancer is a myeloma, for example, multiple myeloma.

[0179] In another embodiment, the cancer is chosen from a carcinoma (e.g., advanced or metastatic carcinoma), melanoma or a lung carcinoma, e.g., a non-small cell lung carcinoma.

[0180] In one embodiment, the cancer is a lung cancer, e.g., a lung adenocarcinoma, non-small cell lung cancer or small cell lung cancer.

[0181] In one embodiment, the cancer is a melanoma, e.g., an advanced melanoma. In one embodiment, the cancer is an advanced or unresectable melanoma that does not respond to other therapies. In other embodiments, the cancer is a melanoma with a BRAF mutation (e.g., a BRAF V600 mutation). In yet other embodiments, the compositions disclosed herein is administered after treatment with an anti-CTLA-4 antibody (e.g., ipilimumab) with or without a BRAF inhibitor (e.g., vemurafenib or dabrafenib).

[0182] In another embodiment, the cancer is a hepatocarcinoma, e.g., an advanced hepatocarcinoma, with or without a viral infection, e.g., a chronic viral hepatitis.

[0183] In another embodiment, the cancer is a prostate cancer, e.g., an advanced prostate cancer.

[0184] In yet another embodiment, the cancer is a myeloma, e.g., multiple myeloma.

[0185] In yet another embodiment, the cancer is a renal cancer, e.g., a renal cell carcinoma (RCC) (e.g., a metastatic RCC, clear cell renal cell carcinoma (CCRCC) or kidney papillary cell carcinoma).

[0186] In yet another embodiment, the cancer is chosen from a lung cancer, a melanoma, a renal cancer, a breast cancer, a colorectal cancer, a leukemia, or a metastatic lesion of the cancer.

[0187] In a particular embodiment, the cancer is AML. In another particular embodiment, the cancer is colorectal cancer.

[0188] The compositions disclosed herein may be administered when a cancer is detected, or prior to or during an episode of recurrence.

[0189] Administration can begin at the first sign of cancer or recurrence, followed by boosting doses until at least symptoms are substantially abated and for a period thereafter.

[0190] In some embodiments, the compositions can be administered to a subject with cancer who has undergone tumor resection surgery that results in an insufficient amount of resected tumor tissue (e.g., less than 7 g, less than 6 g, less than 5 g, less than 4 g, less than 3 g, less than 2 g, or less than 1 g of resected tumor tissue) for production of a therapeutically effective amount of an autologous cancer vaccine comprising a representative set of antigens collected from the resected tumor tissue. See, for example, cancer vaccines described in Expert Opin. Biol. Ther. 2009 February; 9(2):179-86; incorporated herein by reference.

[0191] The compositions disclosed herein can also be used for immunization against recurrence of cancers. Prophylactic administration of a composition to an individual can confer protection against a future recurrence of a cancer.

### 6.4.2 Combination Therapy

[0192] Combination therapy refers to the use of compositions disclosed herein, as a first modality, with a second modality to treat cancer. Accordingly, in certain embodiments, the instant disclosure provides a method of inducing a cellular immune response to an antigenic peptide in a subject as disclosed herein, or a method of treating a disease in a subject as disclosed herein, the method comprising administering to the subject an effective amount of (a) a composition as disclosed herein and (b) a second modality.

[0193] In one embodiment, the second modality is a non-HSP modality, e.g., a modality that does not comprise HSP as a component. This approach is commonly termed combination therapy, adjunctive therapy or conjunctive therapy (the terms are used interchangeably). With combination therapy, additive potency or additive therapeutic effect can be observed. Synergistic outcomes are sought where the therapeutic efficacy is greater than additive. The use of combination therapy can also provide better therapeutic profiles than the administration of either the first or the second modality alone.

[0194] The additive or synergistic effect may allow for a reduction in the dosage and/or dosing frequency of either or both modalities to mitigate adverse effects. In certain embodiments, the second modality administered alone is not clinically adequate to treat the subject (e.g., the subject is non-responsive or refractory to the single modality), such that the subject needs an additional modality. In certain embodiments, the subject has responded to the second modality, yet suffers from side effects, relapses, develops resistance, etc., such that the subject needs an additional modality. Methods disclosed herein comprising administration of the compositions disclosed herein to such subjects to improve the therapeutic effectiveness of the second modality. The effectiveness of a treatment modality can be assayed in vivo or in vitro using methods known in the art.

[0195] In one embodiment, a lesser amount of the second modality is required to produce a therapeutic benefit in a subject. In specific embodiments, a reduction of about 10%, 20%, 30%, 40% and 50% of the amount of second modality can be achieved. The amount of the second modality, including amounts in a range that does not produce any observable therapeutic benefits, can be determined by dose-response experiments conducted in animal models by methods well known in the art.

[0196] In certain embodiments, the second modality comprises a TCR, e.g., a soluble TCR or a cell expressing a TCR. In certain embodiments, the second modality comprises a cell expressing a chimeric antigen receptor (CAR). In certain embodiments, the cell expressing the TCR or CAR is a T cell. In a particular embodiment, the TCR or CAR binds to (e.g., specifically binds to) at least one MHC-binding epitope in the composition disclosed herein.

[0197] In certain embodiments, the second modality comprises a TCR mimic antibody. In certain embodiments, the TCR mimic antibody is an antibody that specifically binds to a peptide-MHC complex. Non-limiting examples of TCR mimic antibodies are disclosed in U.S. Pat. No. 9,074,000, U.S. Publication Nos. US 2009/0304679 A1 and US 2014/0134191 A1, all of which are incorporated herein by reference in their entireties. In a particular embodiment, the TCR mimic antibody binds to (e.g., specifically binds to) at least one MHC-binding epitope in the composition disclosed herein.

[0198] In certain embodiments, the second modality comprises a checkpoint targeting agent. In certain embodiments, the checkpoint targeting agent is selected from the group consisting of an antagonist anti-CTLA-4 antibody, an antagonist anti-PD-L1 antibody, an antagonist anti-PD-L2 antibody, an antagonist anti-PD-1 antibody, an antagonist anti-TIM-3 antibody, an antagonist anti-LAG-3 antibody, an antagonist anti-CEACAM1 antibody, an agonist anti-CD137 antibody, an antagonist anti-TIGIT antibody, an antagonist anti-VISTA antibody, an agonist anti-GITR antibody, and an agonist anti-OX40 antibody.

[0199] In certain embodiments, an anti-PD-1 antibody is used as the second modality in methods disclosed herein. In certain embodiments, the anti-PD-1 antibody is nivolumab, also known as BMS-936558 or MDX1106, developed by Bristol-Myers Squibb. In certain embodiments, the anti-PD-1 antibody is pembrolizumab, also known as lambrolizumab or MK-3475, developed by Merck & Co. In certain embodiments, the anti-PD-1 antibody is pidilizumab, also known as CT-011, developed by CureTech. In certain embodiments, the anti-PD-1 antibody is MEDI0680, also known as AMP-514, developed by Medimmune. In certain embodiments, the anti-PD-1 antibody is PDR001 developed by Novartis Pharmaceuticals. In certain embodiments, the anti-PD-1 antibody is REGN2810 developed by Regeneron Pharmaceuticals. In certain embodiments, the anti-PD-1 antibody is PF-06801591 developed by Pfizer. In certain embodiments, the anti-PD-1 antibody is BGB-A317 developed by BeiGene. In certain embodiments, the anti-PD-1 antibody is TSR-042 developed by AnaptysBio and Tesaro. In certain embodiments, the anti-PD-1 antibody is SHR-1210 developed by Hengrui.

[0200] Further non-limiting examples of anti-PD-1 antibodies that may be used in treatment methods disclosed herein are disclosed in the following patents and patent applications, all of which are herein incorporated by reference in their entireties for all purposes: U.S. Pat. Nos. 6,808,710; 7,332,582; 7,488,802; 8,008,449; 8,114,845; 8,168,757; 8,354,509; 8,686,119; 8,735,553; 8,747,847; 8,779,105; 8,927,697; 8,993,731; 9,102,727; 9,205,148; U.S. Publication No. US 2013/0202623 A1; U.S. Publication No. US 2013/0291136 A1; U.S. Publication No. US 2014/0044738 A1; U.S. Publication No. US 2014/0356363 A1; U.S. Publication No. US 2016/0075783 A1; and PCT Publication No. WO 2013/033091 A1; PCT Publication No. WO 2015/036394 A1; PCT Publication No. WO 2014/179664 A2; PCT Publication No. WO 2014/209804 A1; PCT Publication No. WO 2014/206107 A1; PCT Publication No. WO 2015/058573 A1; PCT Publication No. WO 2015/085847 A1; PCT Publication No. WO 2015/200119 A1; PCT Publication No. WO 2016/015685 A1; and PCT Publication No. WO 2016/020856 A1.

[0201] In certain embodiments, an anti-PD-L1 antibody is used as the second modality in methods disclosed herein. In certain embodiments, the anti-PD-L1 antibody is atezolizumab developed by Genentech. In certain embodiments, the anti-PD-L1 antibody is durvalumab developed by AstraZeneca, Celgene and Medimmune. In certain embodiments, the anti-PD-L1 antibody is avelumab, also known as MSB0010718C, developed by Merck Serono and Pfizer. In certain embodiments, the anti-PD-L1 antibody is MDX-1105 developed by Bristol-Myers Squibb. In certain embodiments, the anti-PD-L1 antibody is AMP-224 developed by Amplimmune and GSK.

[0202] Non-limiting examples of anti-PD-L1 antibodies that may be used in treatment methods disclosed herein are disclosed in the following patents and patent applications, all of which are herein incorporated by reference in their entireties for all purposes: U.S. Pat. Nos. 7,943,743; 8,168,179; 8,217,149; 8,552,154; 8,779,108; 8,981,063; 9,175,082; U.S. Publication No. US 2010/0203056 A1; U.S. Publication No. US 2003/0232323 A1; U.S. Publication No. US 2013/0323249 A1; U.S. Publication No. US 2014/0341917 A1; U.S. Publication No. US 2014/0044738 A1; U.S. Publication No. US 2015/0203580 A1; U.S. Publication No. US 2015/0225483 A1; U.S. Publication No. US 2015/0346208 A1; U.S. Publication No. US 2015/0355184 A1; and PCT Publication No. WO 2014/100079 A1; PCT Publication No. WO 2014/022758 A1; PCT Publication No. WO 2014/055897 A2; PCT Publication No. WO 2015/061668 A1; PCT Publication No. WO 2015/109124 A1; PCT Publication No. WO 2015/195163 A1; PCT Publication No. WO 2016/000619 A1; and PCT Publication No. WO 2016/030350 A1.

[0203] In certain embodiments, a compound that targets an immunomodulatory enzyme(s) such as IDO (indoleamine-(2,3)-dioxygenase) and/or TDO (tryptophan 2,3-dioxygenase) is used as the second modality in methods disclosed herein. Therefore, in one embodiment, the compound targets an immunomodulatory enzyme(s), such as an inhibitor of indoleamine-(2,3)-dioxygenase (IDO). In certain embodiments, such compound is selected from the group consisting of epacadostat (Incyte Corp; see, e.g., WO 2010/005958 which is herein incorporated by reference in its entirety), F001287 (Flexus Biosciences/Bristol-Myers Squibb), indoximod (NewLink Genetics), and NLG919 (NewLink Genetics). In one embodiment, the compound is epacadostat. In another embodiment, the compound is F001287. In another embodiment, the compound is indoximod. In another embodiment, the compound is NLG919. In a specific embodiment, an anti-TIM-3 (e.g., human TIM-3) antibody disclosed herein is administered to a subject in combination with an IDO inhibitor for treating cancer. The IDO inhibitor as described herein for use in treating cancer is present in a solid dosage form of a composition such as a tablet, a pill or a capsule, wherein the composition includes an IDO inhibitor and a pharmaceutically acceptable excipient. As such, the antibody as described herein and the IDO inhibitor as described herein can be administered separately, sequentially or concurrently as separate dosage forms. In one embodiment, the antibody is administered parenterally, and the IDO inhibitor is administered orally. In particular embodiments, the inhibitor is selected from the group consisting of epacadostat (Incyte Corporation), F001287 (Flexus Biosciences/Bristol-Myers Squibb), indoximod (NewLink Genetics), and NLG919 (NewLink Genetics). Epacadostat has been described in PCT Publication No. WO 2010/005958, which is herein incorporated by reference in its entirety for all purposes. In one embodiment, the inhibitor is epacadostat. In another embodiment, the inhibitor is F001287. In another embodiment, the inhibitor is indoximod. In another embodiment, the inhibitor is NLG919.

[0204] In certain embodiments, the second modality comprises a different vaccine (e.g., a peptide vaccine, a DNA vaccine, or an RNA vaccine) for treating cancer. In certain embodiments, the vaccine is a heat shock protein-based tumor vaccine or a heat shock protein-based pathogen vaccine (e.g., a vaccine as described in WO 2016/183486, which is incorporated herein by reference in its entirety). In a specific embodiment, the second modality comprises a stress protein-based vaccine. For example, in certain embodiments, the second modality comprises a composition as disclosed herein that is different from the first modality. In certain embodiments, the second modality comprises a composition analogous to those disclosed herein except for having a different sequence of the HSP-binding peptide. In certain embodiments, the stress protein-based vaccine is derived from a tumor preparation, such that the immunity elicited by the vaccine is specifically directed against the unique antigenic peptide repertoire expressed by the cancer of each subject.

[0205] In certain embodiments, the second modality comprises one or more adjuvants, such as the ones disclosed supra that may be included in the vaccine formulation disclosed herein. In certain embodiments, the second modality comprises a saponin, an immunostimulatory nucleic acid, and/or QS-21. In certain embodiments, the second modality comprises a Toll-like receptor (TLR) agonist. In certain embodiments, the TLR agonist is an agonist of TLR4. In certain embodiments, the TLR agonist is an agonist of TLR7 and/or TLR8. In certain embodiments, the TLR agonist is an agonist of TLR9. In certain embodiments, the TLR agonist is an agonist of TLR5.

[0206] In certain embodiments, the second modality comprises one or more of the agents selected from the group consisting of lenalidomide, dexamethasone, interleukin-2, recombinant interferon alfa-2b, and peginterferon alfa-2b.

[0207] In certain embodiments, where the composition is used for treating a subject having cancer, the second modality comprises a chemotherapeutic or a radiotherapeutic. In certain embodiments, the chemotherapeutic agent is a hypomethylating agent (e.g., azacitidine).

[0208] The composition disclosed herein can be administered separately, sequentially, or concurrently from the second modality (e.g., chemotherapeutic, radiotherapeutic, checkpoint targeting agent, IDO inhibitor, vaccine, adjuvant, soluble TCR, cell expressing a TCR, cell expressing a CAR, and/or TCR mimic antibody), by the same or different delivery routes.

### 6.4.3 Dosage Regimen

[0209] The dosage of the compositions disclosed herein, and the dosage of any additional treatment modality if combination therapy is to be administered, depends to a large extent on the weight and general state of health of the subject being treated, as well as the frequency of treatment and the route of administration. Amounts effective for this use will also depend on the stage and severity of the disease and the judgment of the prescribing physician, but generally range for the initial immunization (that is, for therapeutic administration) from about 1.0 μg to about 1000 μg (1 mg) (including, for example, 10, 20, 25, 30, 40, 50, 60, 70, 80, 90, 100, 150, 200, 240, 250, 300, 350, 400, 450, 500, 550, 600, 650, 700, 750, 800, 850, 900, 950, or 1000 μg) of any one of the compositions disclosed herein for a 70 kg patient, followed by boosting dosages of from about 1.0 μg to about 1000 μg of the composition (including, for example, 10, 20, 25, 30, 40, 50, 60, 70, 80, 90, 100, 150, 200, 250, 300, 350, 400, 450, 500, 550, 600, 650, 700, 750, 800, 850, 900, 950, or 1000 μg) pursuant to a boosting regimen over weeks to months depending upon the patient's response and condition by measuring specific CTL activity in the patient's blood. Regimens for continuing therapy, including site, dose and frequency may be guided by the initial response and clinical judgment. Dosage ranges and regimens for adjuvants are known to those in the art, see, e.g., Vogel and Powell, 1995, A Compendium of Vaccine Adjuvants and Excipients; M. F. Powell, M. J. Newman (eds.), Plenum Press, New York, pages 141-228.

[0210] Preferred adjuvants include QS-21, e.g., QS-21 Stimulon®, and CpG oligonucleotides. Exemplary dosage ranges for QS-21 are 1 μg to 200 μg per administration. In other embodiments, dosages for QS-21 can be 10, 25, and 50 μg per administration. In certain embodiments, the adjuvant comprises a Toll-like receptor (TLR) agonist. In certain embodiments, the TLR agonist is an agonist of TLR4. In certain embodiments, the TLR agonist is an agonist of TLR7 and/or TLR8. In certain embodiments, the TLR agonist is an agonist of TLR9. In certain embodiments, the TLR agonist is an agonist of TLR5.

[0211] In certain embodiments, the administered amount of compositions depends on the route of administration and the type of HSPs in the compositions. For example, the amount of HSP in the compositions can range, for example, from 5 to 1000 μg (1 mg) per administration. In certain embodiments, the administered amount of compositions comprising Hsc70-, Hsp70- and/or Gp96-polypeptide complexes is, for example, 5, 10, 20, 25, 30, 40, 50, 60, 70, 80, 90, 100, 200, 250, 300, 400, 500, 600, 700, 750, 800, 900, or 1000 μg. In certain embodiments, the administered amount of the composition is in the range of about 10 to 600 μg per administration and about 5 to 100 μg if the composition is administered intradermally. In certain embodiments, the administered amount of the composition is about 5 μg to 600 μg, about 5 μg to 300 μg, about 5 μg to 150 μg, or about 5 μg to 60 μg. In certain embodiments, the administered amount of the composition is less than 100 μg. In certain embodiments, the administered amount of the composition is about 5 μg, g, 50 μg, 120 μg, 240 μg, or 480 μg. In certain embodiments, the compositions comprising complexes of stress proteins and polypeptides are purified.

[0212] In one embodiment of a therapeutic regimen, a dosage substantially equivalent to that observed to be effective in smaller non-human animals (e.g., mice or guinea pigs) is effective for human administration, optionally subject to a correction factor not exceeding a fiftyfold increase, based on the relative lymph node sizes in such mammals and in humans. Specifically, interspecies dose-response equivalence for stress proteins (or HSPs) noncovalently bound to or mixed with antigenic molecules for a human dose is estimated as the product of the therapeutic dosage observed in mice and a single scaling ratio, not exceeding a fifty-fold increase. In certain embodiment, the dosages of the composition can be much smaller than the dosage estimated by extrapolation.

[0213] The doses recited above can be given once or repeatedly, such as daily, every other day, weekly, biweekly, or monthly, for a period up to a year or over a year. Doses are preferably given once every 28 days for a period of about 52 weeks or more.

[0214] In one embodiment, the compositions are administered to a subject at reasonably the same time as an additional treatment modality or modalities. This method provides that the two administrations are performed within a time frame of less than one minute to about five minutes, or up to about sixty minutes from each other, for example, at the same doctor's visit.

[0215] In another embodiment, the compositions and an additional treatment modality or modalities are administered concurrently.

[0216] In yet another embodiment the compositions and an additional treatment modality or modalities are administered in a sequence and within a time interval such that the complexes disclosed herein, and the additional treatment modality or modalities can act together to provide an increased benefit than if they were administered alone.

[0217] In another embodiment, the compositions and an additional treatment modality or modalities are administered sufficiently close in time so as to provide the desired therapeutic or prophylactic outcome. Each can be administered simultaneously or separately, in any appropriate form and by any suitable route. In one embodiment, the complexes disclosed herein, and the additional treatment modality or modalities are administered by different routes of administration. In an alternate embodiment, each is administered by the same route of administration. The compositions can be administered at the same or different sites, e.g. arm and leg. When administered simultaneously, the compositions and an additional treatment modality or modalities may or may not be administered in admixture or at the same site of administration by the same route of administration.

[0218] In various embodiments, the compositions and an additional treatment modality or modalities are administered less than 1 hour apart, at about 1 hour apart, 1 hour to 2 hours apart, 2 hours to 3 hours apart, 3 hours to 4 hours apart, 4 hours to 5 hours apart, 5 hours to 6 hours apart, 6 hours to 7 hours apart, 7 hours to 8 hours apart, 8 hours to 9 hours apart, 9 hours to 10 hours apart, 10 hours to 11 hours apart, 11 hours to 12 hours apart, no more than 24 hours apart or no more than 48 hours apart. In other embodiments, the compositions and a vaccine composition are administered 2 to 4 days apart, 4 to 6 days apart, 1 week a part, 1 to 2 weeks apart, 2 to 4 weeks apart, one month apart, 1 to 2 months apart, or 2 or more months apart. In preferred embodiments, the compositions and an additional treatment modality or modalities are administered in a time frame where both are still active. One skilled in the art would be able to determine such a time frame by determining the half-life of each administered component.

[0219] In certain embodiments, the compositions are administered to the subject weekly for at least four weeks. In certain embodiments, after the four weekly doses, at least 2 (e.g., 2, 3, 4, 5, 6, 7, 8, 9, 10, 11, 12, 13, 14, 15, 16, 17, 18, 19, or 20) further doses of the compositions are administered biweekly to the subject. In certain embodiments, the compositions administered as a booster three months after the final weekly or biweekly dose. The booster that is administered every three months can be administered for the life of the subject (e.g., at least 1, 2, 3, 4, 5, 6, 7, 8, 9, 10, 11, 12, 13, 14, 15, 16, 17, 18, 19, 20, 25, 30, 40, 50, or more years). In certain embodiments, the total number of doses of the compositions administered to the subject is 1, 2, 3, 4, 5, 6, 7, 8, 9, 10, 11, 12, 13, 14, 15, 16, 17, 18, 19, or 20.

[0220] In one embodiment, the compositions and an additional treatment modality or modalities are administered within the same patient visit. In certain embodiments, the compositions are administered prior to the administration of an additional treatment modality or modalities. In an alternate specific embodiment, the compositions are administered subsequent to the administration of an additional treatment modality or modalities.

[0221] In certain embodiments, the compositions and an additional treatment modality or modalities are cyclically administered to a subject. Cycling therapy involves the administration of the compositions for a period of time, followed by the administration of a modality for a period of time and repeating this sequential administration. Cycling therapy can reduce the development of resistance to one or more of the therapies, avoid or reduce the side effects of one of the therapies, and/or improve the efficacy of the treatment. In such embodiments, the disclosure contemplates the alternating administration of the compositions followed by the administration of a modality 4 to 6 days later, preferable 2 to 4 days, later, more preferably 1 to 2 days later, wherein such a cycle may be repeated as many times as desired. In certain embodiments, the compositions and the modality are alternately administered in a cycle of less than 3 weeks, once every two weeks, once every 10 days or once every week. In certain embodiments, the compositions are administered to a subject within a time frame of one hour to twenty-four hours after the administration of a modality. The time frame can be extended further to a few days or more if a slow- or continuous-release type of modality delivery system is used.

### 6.4.4 Routes of Administration

[0222] The compositions disclosed herein may be administered using any desired route of administration. Many methods may be used to introduce the compositions described above, including but not limited to, oral, intradermal, intramuscular, intraperitoneal, intravenous, subcutaneous, mucosal, intranasal, intra-tumoral, and intra-lymph node routes. Non-mucosal routes of administration include, but are not limited to, intradermal and topical administration. Mucosal routes of administration include, but are not limited to, oral, rectal and nasal administration. Advantages of intradermal administration include use of lower doses and rapid absorption, respectively. Advantages of subcutaneous or intramuscular administration include suitability for some insoluble suspensions and oily suspensions, respectively. Preparations for mucosal administrations are suitable in various formulations as described below.

[0223] Solubility and the site of the administration are factors which should be considered when choosing the route of administration of the compositions. The mode of administration can be varied between multiple routes of administration, including those listed above.

[0224] If the compositions are water-soluble, then it may be formulated in an appropriate buffer, for example, phosphate buffered saline or other physiologically compatible solutions, preferably sterile. Alternatively, if a composition has poor solubility in aqueous solvents, then it may be formulated with a non-ionic surfactant such as Tween, or polyethylene glycol. Thus, the compositions may be formulated for administration by inhalation or insufflation (either through the mouth or the nose) or oral, buccal, parenteral, or rectal administration.

[0225] For oral administration, the composition may be in liquid form, for example, solutions, syrups or suspensions, or may be presented as a drug product for reconstitution with water or other suitable vehicle before use. Such a liquid preparation may be prepared by conventional means with pharmaceutically acceptable additives such as suspending agents (e.g., sorbitol syrup, cellulose derivatives or hydrogenated edible fats); emulsifying agents (e.g., lecithin or acacia); non-aqueous vehicles (e.g., almond oil, oily esters, or fractionated vegetable oils); and preservatives (e.g., methyl or propyl-p-hydroxybenzoates or sorbic acid). The compositions may take the form of, for example, tablets or capsules prepared by conventional means with pharmaceutically acceptable excipients such as binding agents (e.g., pre-gelatinized maize starch, polyvinyl pyrrolidone or hydroxypropyl methylcellulose); fillers (e.g., lactose, microcrystalline cellulose or calcium hydrogen phosphate); lubricants (e.g., magnesium stearate, talc or silica); disintegrants (e.g., potato starch or sodium starch glycolate); or wetting agents (e.g., sodium lauryl sulphate). The tablets may be coated by methods well-known in the art.

[0226] The compositions for oral administration may be suitably formulated to be released in a controlled and/or timed manner.

[0227] For buccal administration, the compositions may take the form of tablets or lozenges formulated in conventional manner.

[0228] The preparation may be formulated for parenteral administration by injection, e.g., by bolus injection or continuous infusion. Formulations for injection may be presented in unit dosage form, e.g., in ampoules or in multi-dose containers, with an added preservative. The preparation may take such forms as suspensions, solutions or emulsions in oily or aqueous vehicles, and may contain formulatory agents such as suspending, stabilizing and/or dispersing agents. Alternatively, the active ingredient may be in powder form for constitution with a suitable vehicle, e.g., sterile pyrogen-free water, before use.

[0229] The preparation may also be formulated in a rectal preparation such as a suppository or retention enema, e.g., containing conventional suppository bases such as cocoa butter or other glycerides.

[0230] In addition to the formulations described above, the preparation may also be formulated as a depot preparation. Such long acting formulations may be administered by implantation (for example, subcutaneously or intramuscularly) or by intramuscular injection. Thus, for example, the preparation may be formulated with suitable polymeric or hydrophobic materials (for example, as emulsion in an acceptable oil) or ion exchange resins, or as sparingly soluble derivatives, for example, as a sparingly soluble salt. Liposomes and emulsions are well known examples of delivery vehicles or carriers for hydrophilic drugs.

[0231] For administration by inhalation, the compositions are conveniently delivered in the form of an aerosol spray presentation from pressurized packs or a nebulizer, with the use of a suitable propellant, e.g., dichlorodifluoromethane, trichlorofluoromethane, dichlorotetrafluoroethane, carbon dioxide or other suitable gas. In the case of a pressurized aerosol the dosage unit may be determined by providing a valve to deliver a metered amount. Capsules and cartridges of, e.g., gelatin for use in an inhaler or insufflator may be formulated containing a powder mix of the compound and a suitable powder base such as lactose or starch.

### 6.4.5 Patient (Subject) Evaluation

[0232] Patients treated with the compositions disclosed herein may be tested for an anti-tumor immune response. In this regard, peripheral blood from patients may be obtained and assayed for markers of anti-tumor immunity. Using standard laboratory procedures, leukocytes may be obtained from the peripheral blood and assayed for frequency of different immune cell phenotypes, HLA subtype, and function of anti-tumor immune cells.

[0233] The majority of effector immune cells in the anti-tumor response is CD8⁺ T cells and thus is HLA class I restricted. Using immunotherapeutic strategies in other tumor types, expansion of CD8+ cells that recognize HLA class I restricted antigens is found in a majority of patients. However, other cell types are involved in the anti-tumor immune response, including, for example, CD4+ T cells, and macrophages and dendritic cells, which may act as antigen-presenting cells. Populations of T cells (CD4+, CD8+, and Treg cells), macrophages, and antigen presenting cells may be determined using flow cytometry. HLA typing may be performed using routine methods in the art, such as methods described in Boegel et al. Genome Medicine 2012, 4:102 (seq2HLA), or using a TruSight® HLA sequencing panel (Illumina, Inc.). The HLA subtype of CD8+ T cells may be determined by a complement-dependent microcytotoxicity test.

[0234] To determine if there is an increase in anti-tumor T cell response, an enzyme linked immunospot assay may be performed to quantify the IFNγ-producing peripheral blood mononuclear cells (PBMC). This technique provides an assay for antigen recognition and immune cell function. In some embodiments, subjects who respond clinically to the vaccine may have an increase in tumor-specific T cells and/or IFNγ-producing PBMCs. In some embodiments, immune cell frequency is evaluated using flow cytometry. In some embodiments, antigen recognition and immune cell function is evaluated using enzyme linked immunospot assays.

[0235] In some embodiments, a panel of assays may be performed to characterize the immune response generated to the composition alone or given in combination with standard of care (e.g., maximal surgical resection, radiotherapy, and concomitant and adjuvant chemotherapy with temozolomide for glioblastoma multiforme). In some embodiments, the panel of assays includes one or more of the following tests: whole blood cell count, absolute lymphocyte count, monocyte count, percentage of CD4⁺CD3⁺ T cells, percentage of CD8⁺CD3⁺ T cells, percentage of CD4⁺CD25⁺FoxP3⁺ regulatory T cells and other phenotyping of PBL surface markers, intracellular cytokine staining to detect proinflammatory cytokines at the protein level, qPCR to detect cytokines at the mRNA level and CFSE dilution to assay T cell proliferation.

[0236] In evaluating a subject, a number of other tests may be performed to determine the overall health of the subject. For example, blood samples may be collected from subjects and analyzed for hematology, coagulation times and serum biochemistry. Hematology for CBC may include red blood cell count, platelets, hematocrit, hemoglobin, white blood cell (WBC) count, plus WBC differential to be provided with absolute counts for neutrophils, eosinophils, basophils, lymphocytes, and monocytes. Serum biochemistry may include albumin, alkaline phosphatase, aspartate amino transferase, alanine amino transferase, total bilirubin, BUN, glucose, creatinine, potassium and sodium. Protime (PT) and partial thromboplastin time (PTT) may also be tested. One or more of the following tests may also be conducted: anti-thyroid (anti-microsomal or thyroglobulin) antibody tests, assessment for anti-nuclear antibody, and rheumatoid factor. Urinalysis may be performed to evaluated protein, RBC, and WBC levels in urine. Also, a blood draw to determine histocompatibility leukocyte antigen (HLA) status may be performed.

[0237] In some embodiments, radiologic tumor evaluations are performed one or more times throughout a treatment to evaluate tumor size and status. For example, tumor evaluation scans may be performed within 30 days prior to surgery, within 48 hours after surgery (e.g., to evaluate percentage resection), 1 week (maximum 14 days) prior to the first vaccination (e.g., as a baseline evaluation), and approximately every 8 weeks thereafter for a particular duration. MRI or CT imaging may be used. Typically, the same imaging modality used for the baseline assessment is used for each tumor evaluation visit.

### 6.5 Antibodies and T Cell Receptors

[0238] In another aspect, the instant disclosure provides an isolated antibody that specifically binds to an MHC-binding peptide selected from the group consisting of SEQ ID NOs: 98-1371, 3921-3996, and 4149-4171, and/or to a complex of an MHC molecule and an MHC-binding peptide selected from the group consisting of SEQ ID NOs: 98-1371, 3921-3996, and 4149-4171. In certain embodiments, the antibody does not specifically bind (or binds with reduced affinity) to an unphosphorylated variant of the MHC-binding peptide, and/or to a complex of an MHC molecule and an unphosphorylated variant of the MHC-binding peptide. The antibody can be of any format known in the art or disclosed herein. In certain embodiments, the antibody is a chimeric antigen receptor. Chimeric antigen receptors are well known in the art (see e.g., Subklewe M, et al, Transfus Med Hemother 2019; 46:15-24. doi: 10.1159/000496870, which is incorporated by reference herein in its entirety).

[0239] In another aspect, the instant disclosure provides an isolated polynucleotide encoding a VH region and/or VL region of the aforementioned antibody. The isolated polynucleotide can comprise DNA and/or RNA, and/or analogues or derivatives thereof. In certain embodiments, the isolated polynucleotide is an mRNA. In certain embodiments, the isolated polynucleotide is comprised within a vector.

[0240] In another aspect, the instant disclosure provides an engineered cell, comprising the aforementioned antibody, isolated polynucleotide (e.g., mRNA), or vector. In certain embodiments, the engineered cell is a human lymphocyte, e.g., a T cell, a CD8+ T cell, a CD4+ T cell, a natural killer T (NKT) cell, an invariant natural killer T (iNKT) cell, a mucosal-associated invariant T (MAiT) cell, or a natural killer (NK) cell.

[0241] In another aspect, the instant disclosure provides an isolated T cell receptor (TCR) that specifically binds to a complex of an MHC molecule and an MHC-binding peptide selected from the group consisting of SEQ ID NOs: 98-1371, 3921-3996, and 4149-4171. In certain embodiments, the TCR does not specifically bind (or binds with reduced affinity) to a complex of the MHC molecule and an unphosphorylated variant of the MHC-binding peptide. The TCR can be of any format known in the art or disclosed herein. In certain embodiments, the TCR is a soluble TCR. In certain embodiments, the TCR further comprises a CD3 binding moiety. In certain embodiments, the TCR is a full-length TCR.

[0242] In another aspect, the instant disclosure provides an isolated polynucleotide encoding a variable region (e.g., a Vα and/or Vβ) of the aforementioned TCR. The isolated polynucleotide can comprise DNA and/or RNA, and/or analogues or derivatives thereof. In certain embodiments, the isolated polynucleotide is an mRNA. In certain embodiments, the isolated polynucleotide is comprised within a vector.

[0243] In another aspect, the instant disclosure provides an engineered cell, comprising the aforementioned TCR, isolated polynucleotide (e.g., mRNA), or vector. In certain embodiments, the engineered cell is a human lymphocyte, e.g., a T cell, a CD8+ T cell, a CD4+ T cell, a natural killer T (NKT) cell, an invariant natural killer T (iNKT) cell, a mucosal-associated invariant T (MAiT) cell, or a natural killer (NK) cell.

### 6.6 Kits

[0244] Kits are also provided for carrying out the prophylactic and therapeutic methods disclosed herein. The kits may optionally further comprise instructions on how to use the various components of the kits.

[0245] In certain embodiments, the kit comprises a first container containing a composition (e.g., composition comprising stress protein(s) and antigenic polypeptide(s) disclosed herein, and a second container containing one or more adjuvants. The adjuvant can be any adjuvant disclosed herein, e.g., a saponin, an immunostimulatory nucleic acid, or QS-21 (e.g., QS-21 Stimulon®). In certain embodiments, the kit further comprises a third container containing an additional treatment modality. The kit can further comprise an instruction on the indication, dosage regimen, and route of administration of the composition, adjuvant, and additional treatment modality, e.g., as disclosed in herein.

[0246] Alternatively, the kit can comprise the stress protein(s) and antigenic polypeptide(s) of a composition disclosed herein in separate containers. In certain embodiments, the kit comprises a first container containing one or more antigenic polypeptides disclosed herein, and a second container containing a purified stress protein capable of binding to the polypeptide.

[0247] The first container can contain any number of different polypeptides. For example, in certain embodiments, the first container contains no more than 100 different polypeptides, e.g., 2-50, 2-30, 2-20, 5-20, 5-15, 5-10, or 10-15 different polypeptides. In certain embodiments, each of the different polypeptides comprises the same HSP-binding peptide and a different antigenic peptide. In certain embodiments, the total amount of the polypeptide(s) in the first container is a suitable amount for a unit dosage. In certain embodiments, the total amount of the polypeptide(s) in the first container is about 0.1 to 20 nmol (e.g., 3, 4, 5, or 6 nmol).

[0248] The second container can contain any stress protein disclosed herein. In certain embodiments, the stress protein is selected from the group consisting of Hsc70, Hsp70, Hsp90, Hsp110, Grp170, Gp96, or Calreticulin, and a mutant or fusion protein thereof. In certain embodiments, the stress protein is Hsc70 (e.g., human Hsc70). In certain embodiments, the stress protein is a recombinant protein. In certain embodiments, the total amount of the stress protein(s) in the second container is about 10 μg to 600 μg (e.g., 120 μg, 240 μg, or 480 μg). In certain embodiments, the total amount of the stress protein(s) in the second container is about 50 μg, 100 μg, 200 μg, 300 μg, 400 μg, or 500 μg. In certain embodiments, the amount of the stress protein in the composition is about 300 μg. In certain embodiments, the total molar amount of the stress protein(s) in the second container is calculated based on the total molar amount of the polypeptide(s) in the first container, such that the molar ratio of the polypeptide(s) to the stress protein(s) is about 0.5:1 to 5:1 (e.g., about 1:1, 1.25:1, 1.5:1, 2:1, 2.5:1, 3:1, 3.5:1, 4:1, 4.5:1, or 5:1). In certain embodiments, the total amount of the stress protein(s) in the second container is an amount for multiple administrations (e.g., less than or equal to 1 mg, 3 mg, 10 mg, 30 mg, or 100 mg).

[0249] In certain embodiments, the kit further comprises an instruction for preparing a composition from the polypeptide(s) in the first container and the stress protein(s) in the second container (e.g., an instruction for the complexing reaction as disclosed herein).

[0250] In certain embodiments, the kit further comprises a third container containing one or more adjuvants. The adjuvant can be any adjuvant disclosed herein, e.g., a saponin, an immunostimulatory nucleic acid, or QS-21 (e.g., QS-21 Stimulon®). In certain embodiments, the kit further comprises a fourth container containing an additional treatment modality. The kit can further comprise an instruction on the indication, dosage regimen, and route of administration of the composition prepared from the polypeptide(s) and stress protein(s), the adjuvant, and the additional treatment modality, e.g., as disclosed herein.

[0251] In certain embodiments, the composition, polypeptide(s), stress protein(s), adjuvant(s), and additional treatment modality in the containers are present in pre-determined amounts effective to treat cancers. If desired, the compositions can be presented in a pack or dispenser device which may contain one or more unit dosage forms of the compositions. The pack may, for example, comprise metal or plastic foil, such as a blister pack. The pack or dispenser device may be accompanied by instructions for administration.

### EXAMPLES

[0252] The examples in this Section are offered by way of illustration, and not by way of limitation.

### 6.7 Example 1: Phosphopeptide Isolation and Identification

[0253] This example describes the isolation and identification of tumor-associated phosphopeptide neoantigens from cancer patient tissue samples and cancer cell line samples.

[0254] The isolation of the phosphopeptides proceeded as follows. First, HLA:peptide complexes were immunopurified from samples using a pan-HLA class I antibody. Briefly, NHS-activated sepharose beads were conjugated with anti-human HLA class I antibody (W6/32, Bio X Cell®). Cells from samples were lysed in the presence of protease and phosphatase inhibitors and then incubated with the anti-human HLA class I antibody conjugated beads. After incubation, beads were loaded onto a poly-prep column and washed. The beads were resuspended in a no-salt buffer and transferred to a 30K MWCO Amicon® ultra spin filter for removal of the buffer.

[0255] HLA-bound peptides were eluted, desalted, and concentrated using stop and go extraction (STAGE) tip containing a C18 reversed phase matrix. Briefly, isolated HLA:peptide complexes were transferred from a the 30K MWCO Amicon® ultra spin filter into a low-protein binding tube using subsequent water rinses to ensure complete transfer. The beads were centrifuged, and the resulting supernatant was loaded onto equilibrated STAGE tips. The beads were again washed, and the supernatant was loaded onto STAGE tips for 1 minute each at 3500×g to ensure loading of any peptides which had become dissociated from HLA molecules.

[0256] Next, peptides were eluted from HLA molecules with 150 μL of 10% acetic acid. Beads were centrifuged at 300×g for 30 seconds and the supernatant transferred to a low-binding tube. This process was repeated to ensure complete elution of peptides from HLA molecules and the supernatant added to the low-binding tube. The supernatant was loaded onto the STAGE tips in 150 μL aliquots at 3500×g until the entire volume had passed through. The STAGE tips were washed using three rounds of 100 μL of 1% acetic acid, and peptides subsequently eluted using a stepwise gradient of increasing acetonitrile concentrations.

[0257] Phosphopeptides were enriched by immobilized metal affinity chromatography, using immobilized iron iminodiacetic acid metal affinity chromatography (Fe-IDA IMAC). Enriched phosphopeptides were chromatographically separated and analyzed on an Orbitrap Fusion™ Lumos™ mass spectrometer using complementary fragmentation methods and sequenced using Byonic™ software.

[0258] Data analysis was performed using Xcalibur™ viewing software. Raw data files were searched using Byonic™ against the Swissprot human protein database and a phosphopeptide database containing identified phosphopeptides from previously analyzed samples. Search parameters included: no enzyme specificity, ±10 ppm precursor mass tolerance, ±0.4 Da product ion mass tolerance, and a 1% false data rate (FDR). Allowed modifications included: fixed modifications of methyl esters (aspartic acid, glutamic acid, and C-termini), and variable modifications of oxidation (methionine, tryptophan, and cysteine) and phosphorylation (serine, threonine, and tyrosine). Peptide hits from search results were confirmed by accurate mass measurement and manually confirmed by inspection of resulting tandem mass spectra for correct amino acid sequence and phosphorylation site assignment.

### 6.8 Example 2: Phosphopeptide Synthesis

[0259] The antigenic peptides set forth in SEQ ID NOs: 119, 120, 228, 290, 339, 424, 433, 547, 654, 657, 933, 1157, 1179, 1207, 1224, 1335, 1337, 1357, 2668, 2972, 3205, 3705, 3755, 3883, 3885, and 3905 were synthesized using standard Fmoc solid-phase chemical synthesis with pre-loaded polystyrene Wang (PS-Wang) resin in a Symphony® X automatic synthesizer (Gyros Protein Technologies Inc®). A sample of the first amino acid loaded resin from the C-terminus was placed in a dry reaction vessel and was charged to each of the 24 reaction/pre-activation vessels. The synthesizer was programmed to run the complete synthesis cycle using O-(1H-6-Chloro benzotriazole-1-yl)-1,1,3,3-tetramethyluronium hexafluorophosphate/N-methylmorpholine HCTU/NMM activation chemistry. The phosphate group was incorporated using N-α-Fmoc-O-benzyl-L-phosphoserine, N-α-Fmoc-O-benzyl-L-phosphothreonine and N-α-Fmoc-O-benzyl-L-phosphotyrosine for serine, threonine and tyrosine respectively. A 5-fold excess of amino acid, 5-fold excess of activating reagent (HCTU) and 10-fold excess of N-methyl morpholine was used for the peptide coupling reaction. The coupling reaction was performed for 10 min with double coupling cycle for any incomplete coupling throughout the synthesis. These steps were repeated until the desired sequence was obtained.

[0260] At the end of the peptide synthesis, the resin was washed with dichloromethane (DCM) and dried. Upon completion of phosphopeptide assembly, the resin was transferred to a cleavage vessel for cleavage of the peptide from the resin. The cleavage reagent (TFA:DTT:Water:TIS at 88:5:5:2 (v/w/v/v)) was mixed with the resin and stirred for 4 hours at 25° C. Crude peptides were isolated from the resin by filtration and evaporated with N₂ gas, followed by precipitation with chilled diethyl ether and storage at 20° C. for 12 hours.

[0261] The precipitated peptides were centrifuged and washed twice with diethyl ether, dried, dissolved in a 1:1 (v/v) mixture of acetonitrile and water, and lyophilized to produce a crude dry powder. The crude peptides were analyzed by reverse phase HPLC with a Luna® C18 analytical column (Phenomenex®, Inc) using a water (0.1% TFA)-acetonitrile (0.1% TFA) gradient. Peptides were further purified by prep-HPLC with a preparative Luna® C18 column (Phenomenex®, Inc) using a water (0.1% TFA)-acetonitrile (0.1% TFA) gradient. Purified fractions were analyzed using analytical HPLC and pure fractions were pooled for subsequent lyophilization. Peptide purity was tested using an analytical Luna® C18-column (Phenomenex®, Inc) and identity confirmed either by LC/MS (6550 Q-TOF, Agilent Technologies®) or MSQ Plus™ (Thermo Electron®, North America).

### 6.9 Example 3: HLA Binding

[0262] In this example, the HLA binding affinity of selected phosphopeptides identified in Example 1 was determined. HLA haplotype specificities were determined using predictive algorithms (IEDB.org) which match the experimentally derived binding motifs of individual HLA haplotypes with specified peptide sequences. Coupling this information with the known HLA haplotypes represented within each patient sample, allowed for prediction of the haplotype(s) that presented each phosphopeptide.

[0263] Phosphopeptides were synthesized according to the methods described in Example 2.

[0264] An AlphaScreen® assay was used to evaluate the binding of peptides to HLA molecules. Donor beads conjugated with streptavidin, and acceptor beads conjugated with the anti-human HLA class I antibody W6/32, were used to assess peptide binding. Biotinylated HLAs (A*02:01, B*07:02, C*07:01, or C*07:02) were mixed with a fixed excess of β2m and the mixtures added to each well of a 384-well microplate. Serial dilutions of the synthesized phosphopeptides were added to the wells, and the resultant HLA/β2/peptide mixtures were incubated overnight at 18° C. W6/32 conjugated acceptor beads were subsequently added to the wells, and the mixture was incubated for 1 hour at 21° C. Streptavidin conjugated donor beads were then added to the wells, and the mixture was incubated for a further 1 hour at 21° C.

[0265] The microplate was read using the PerkinElmer® plate reader, and data were plotted using the Michaelis-Menten equation to determine the K_{d} for each phosphopeptide.

[0266] Table 5 lists the K_{d} of each of the selected phosphopeptides to the indicated HLAs (A*02:01, B*07:02, C*07:01, or C*07:02). NT means that binding was not tested. NB means no binding was detected. LB stands for low binding and indicates that while some binding was observed, it was below the level that would allow accurate calculation of a K_{d}. In each case, the phosphopeptides bound as indicated below.

TABLE 5
HLA binding characteristics of selected phosphopeptides

| | | | K_{d} in | K_{d} in | K_{d} in | |
|---|---|---|---|---|---|---|
| | SEQ ID | Predicted | nM | nM | nM | K_{d} in nM |
| Peptide | NO: | HLA | A*02:01 | B*07:02 | C*07:01 | C*07:02 |
| KLLsYIQRL | 433 | HLA- | 188 | NB | NT | NT |
| | | A*02:01 | | | | |
| KLFHGsLEEL | 424 | HLA- | 203 | NB | NT | NT |
| | | A*02:01 | | | | |
| FLsRSIPSL | 228 | HLA- | 641 | NB | NT | NT |
| | | A*02:01 | | | | |
| QLMtLENKL | 654 | HLA- | 231 | NB | NT | NT |
| | | A*02:01 | | | | |
| APRtPPGVTF | 120 | HLA- | NB | 51.98 | NT | NT |
| | | B*07:02 | | | | |
| SPFLSKRsL | 1157 | HLA- | NB | 116.28 | NT | NT |
| | | B*07:02 | | | | |
| SPRsPISPEL | 1179 | HLA- | NB | 911 | NT | NT |
| | | B*07:02 | | | | |
| YRLsPEPTPL | 1357 | HLA- | NB | NB | NT | NT |
| | | C*07:02 | | | | |
| SRKsFVFEL | 1207 | HLA- | NB | NB | NT | NT |
| | | B*08:01 | | | | |
| HRVsVILKL | 339 | HLA- | NB | NB | NT | NT |
| | | B*14:01 | | | | |
| QPRTPsPLVL | 657 | HLA- | NB | 184.8 | LB | LB |
| | | B*07:02 | | | | |

“‘s’, ‘t’ and ‘y’ indicate phosphorylated serine, threonine and tyrosine, respectively.

[0267] The invention is not to be limited in scope by the specific embodiments described herein. Indeed, various modifications disclosed herein in addition to those described will become apparent to those skilled in the art from the foregoing description and accompanying figures. Such modifications are intended to fall within the scope of the appended claims.

[0268] All references (e.g., publications or patents or patent applications) cited herein are incorporated herein by reference in their entirety and for all purposes to the same extent as if each individual reference (e.g., publication or patent or patent application) was specifically and individually indicated to be incorporated by reference in its entirety for all purposes. Other embodiments are within the following claims.

The application's sequence listing, which the Patent Office published only in electronic form, follows.

SEQUENCE LISTING (4217 sequences)

SEQ ID NO: 1 - protein, 7 aa, Artificial Sequence
  Description of Artificial Sequence: Synthetic peptide
  MOD_RES (1)..(1): Asn, Phe, Gln, or absent
  MOD_RES (2)..(2): Trp, Leu, or Phe
  MOD_RES (3)..(3): Leu or Ile
  MOD_RES (4)..(4): Arg, Leu, or Lys
  MOD_RES (5)..(5): Leu, Trp, or Ile
  MOD_RES (6)..(6): Thr, Leu, Phe, Lys, Arg, or Trp
  MOD_RES (7)..(7): Trp, Gly, Lys, or Phe
XXXXXXX

SEQ ID NO: 2 - protein, 6 aa, Artificial Sequence
  Description of Artificial Sequence: Synthetic peptide
  MOD_RES (1)..(1): Trp or Phe
  MOD_RES (3)..(3): Arg or Lys
  MOD_RES (6)..(6): Trp, Phe, or Gly
XLXLTX

SEQ ID NO: 3 - protein, 7 aa, Artificial Sequence
  Description of Artificial Sequence: Synthetic peptide
  MOD_RES (2)..(2): Trp or Phe
  MOD_RES (4)..(4): Arg or Lys
  MOD_RES (7)..(7): Trp, Phe, or Gly
NXLXLTX

SEQ ID NO: 4 - protein, 6 aa, Artificial Sequence
  Description of Artificial Sequence: Synthetic peptide
  MOD_RES (3)..(3): Arg or Lys
  MOD_RES (6)..(6): Trp or Gly
WLXLTX

SEQ ID NO: 5 - protein, 7 aa, Artificial Sequence
  Description of Artificial Sequence: Synthetic peptide
  MOD_RES (4)..(4): Arg or Lys
  MOD_RES (7)..(7): Trp or Gly
NWLXLTX

SEQ ID NO: 6 - protein, 7 aa, Artificial Sequence
  Description of Artificial Sequence: Synthetic peptide
  MOD_RES (3)..(3): Leu or Ile
  MOD_RES (4)..(4): Leu, Arg, or Lys
  MOD_RES (5)..(5): Leu or Ile
  MOD_RES (6)..(6): Thr, Leu, Phe, Lys, Arg, or Trp
  MOD_RES (7)..(7): Trp or Lys
NWXXXXX

SEQ ID NO: 7 - protein, 7 aa, Artificial Sequence
  Description of Artificial Sequence: Synthetic peptide
NLLRLTG

SEQ ID NO: 8 - protein, 6 aa, Artificial Sequence
  Description of Artificial Sequence: Synthetic peptide
WLRLTW

SEQ ID NO: 9 - protein, 7 aa, Artificial Sequence
  Description of Artificial Sequence: Synthetic peptide
NWLRLTW

SEQ ID NO: 10 - protein, 6 aa, Artificial Sequence
  Description of Artificial Sequence: Synthetic peptide
WLKLTW

SEQ ID NO: 11 - protein, 7 aa, Artificial Sequence
  Description of Artificial Sequence: Synthetic peptide
NWLKLTW

SEQ ID NO: 12 - protein, 6 aa, Artificial Sequence
  Description of Artificial Sequence: Synthetic peptide
WLRLTG

SEQ ID NO: 13 - protein, 7 aa, Artificial Sequence
  Description of Artificial Sequence: Synthetic peptide
NWLRLTG

SEQ ID NO: 14 - protein, 6 aa, Artificial Sequence
  Description of Artificial Sequence: Synthetic peptide
FLRLTF

SEQ ID NO: 15 - protein, 7 aa, Artificial Sequence
  Description of Artificial Sequence: Synthetic peptide
NFLRLTF

SEQ ID NO: 16 - protein, 6 aa, Artificial Sequence
  Description of Artificial Sequence: Synthetic peptide
WLRLTF

SEQ ID NO: 17 - protein, 7 aa, Artificial Sequence
  Description of Artificial Sequence: Synthetic peptide
NWLRLTF

SEQ ID NO: 18 - protein, 6 aa, Artificial Sequence
  Description of Artificial Sequence: Synthetic peptide
WLKLTF

SEQ ID NO: 19 - protein, 7 aa, Artificial Sequence
  Description of Artificial Sequence: Synthetic peptide
NWLKLTF

SEQ ID NO: 20 - protein, 6 aa, Artificial Sequence
  Description of Artificial Sequence: Synthetic peptide
WLKLTG

SEQ ID NO: 21 - protein, 7 aa, Artificial Sequence
  Description of Artificial Sequence: Synthetic peptide
NWLKLTG

SEQ ID NO: 22 - protein, 6 aa, Artificial Sequence
  Description of Artificial Sequence: Synthetic peptide
FLRLTW

SEQ ID NO: 23 - protein, 7 aa, Artificial Sequence
  Description of Artificial Sequence: Synthetic peptide
NFLRLTW

SEQ ID NO: 24 - protein, 6 aa, Artificial Sequence
  Description of Artificial Sequence: Synthetic peptide
FLRLTG

SEQ ID NO: 25 - protein, 7 aa, Artificial Sequence
  Description of Artificial Sequence: Synthetic peptide
NFLRLTG

SEQ ID NO: 26 - protein, 6 aa, Artificial Sequence
  Description of Artificial Sequence: Synthetic peptide
FLKLTW

SEQ ID NO: 27 - protein, 7 aa, Artificial Sequence
  Description of Artificial Sequence: Synthetic peptide
NFLKLTW

SEQ ID NO: 28 - protein, 6 aa, Artificial Sequence
  Description of Artificial Sequence: Synthetic peptide
FLKLTF

SEQ ID NO: 29 - protein, 7 aa, Artificial Sequence
  Description of Artificial Sequence: Synthetic peptide
NFLKLTF

SEQ ID NO: 30 - protein, 6 aa, Artificial Sequence
  Description of Artificial Sequence: Synthetic peptide
FLKLTG

SEQ ID NO: 31 - protein, 7 aa, Artificial Sequence
  Description of Artificial Sequence: Synthetic peptide
NFLKLTG

SEQ ID NO: 32 - protein, 7 aa, Artificial Sequence
  Description of Artificial Sequence: Synthetic peptide
NWLLLTW

SEQ ID NO: 33 - protein, 7 aa, Artificial Sequence
  Description of Artificial Sequence: Synthetic peptide
NLLRWTG

SEQ ID NO: 34 - protein, 7 aa, Artificial Sequence
  Description of Artificial Sequence: Synthetic peptide
FWLRLTW

SEQ ID NO: 35 - protein, 7 aa, Artificial Sequence
  Description of Artificial Sequence: Synthetic peptide
NWLRLLW

SEQ ID NO: 36 - protein, 7 aa, Artificial Sequence
  Description of Artificial Sequence: Synthetic peptide
NWLRLFW

SEQ ID NO: 37 - protein, 7 aa, Artificial Sequence
  Description of Artificial Sequence: Synthetic peptide
NWLRLKW

SEQ ID NO: 38 - protein, 7 aa, Artificial Sequence
  Description of Artificial Sequence: Synthetic peptide
NWIRITW

SEQ ID NO: 39 - protein, 7 aa, Artificial Sequence
  Description of Artificial Sequence: Synthetic peptide
QWLRLTW

SEQ ID NO: 40 - protein, 7 aa, Artificial Sequence
  Description of Artificial Sequence: Synthetic peptide
NWLKLKW

SEQ ID NO: 41 - protein, 7 aa, Artificial Sequence
  Description of Artificial Sequence: Synthetic peptide
NWLKLRW

SEQ ID NO: 42 - protein, 7 aa, Artificial Sequence
  Description of Artificial Sequence: Synthetic peptide
NWLKLWK

SEQ ID NO: 43 - protein, 4 aa, Artificial Sequence
  Description of Artificial Sequence: Synthetic peptide
FFRK

SEQ ID NO: 44 - protein, 11 aa, Artificial Sequence
  Description of Artificial Sequence: Synthetic peptide
  MOD_RES (5)..(5): Asn, Phe, Gln, or absent
  MOD_RES (6)..(6): Trp, Leu, or Phe
  MOD_RES (7)..(7): Leu or Ile
  MOD_RES (8)..(8): Arg, Leu, or Lys
  MOD_RES (9)..(9): Leu, Trp, or Ile
  MOD_RES (10)..(10): Thr, Leu, Phe, Lys, Arg, or Trp
  MOD_RES (11)..(11): Trp, Gly, Lys, or Phe
FFRKXXXXXXX

SEQ ID NO: 45 - protein, 10 aa, Artificial Sequence
  Description of Artificial Sequence: Synthetic peptide
  MOD_RES (5)..(5): Trp or Phe
  MOD_RES (7)..(7): Arg or Lys
  MOD_RES (10)..(10): Trp, Phe, or Gly
FFRKXLXLTX

SEQ ID NO: 46 - protein, 11 aa, Artificial Sequence
  Description of Artificial Sequence: Synthetic peptide
  MOD_RES (6)..(6): Trp or Phe
  MOD_RES (8)..(8): Arg or Lys
  MOD_RES (11)..(11): Trp, Phe, or Gly
FFRKNXLXLTX

SEQ ID NO: 47 - protein, 10 aa, Artificial Sequence
  Description of Artificial Sequence: Synthetic peptide
  MOD_RES (7)..(7): Arg or Lys
  MOD_RES (10)..(10): Trp or Gly
FFRKWLXLTX

SEQ ID NO: 48 - protein, 11 aa, Artificial Sequence
  Description of Artificial Sequence: Synthetic peptide
  MOD_RES (8)..(8): Arg or Lys
  MOD_RES (11)..(11): Trp or Gly
FFRKNWLXLTX

SEQ ID NO: 49 - protein, 11 aa, Artificial Sequence
  Description of Artificial Sequence: Synthetic peptide
  MOD_RES (7)..(7): Leu or Ile
  MOD_RES (8)..(8): Leu, Arg, or Lys
  MOD_RES (9)..(9): Leu or Ile
  MOD_RES (10)..(10): Thr, Leu, Phe, Lys, Arg, or Trp
  MOD_RES (11)..(11): Trp or Lys
FFRKNWXXXXX

SEQ ID NO: 50 - protein, 11 aa, Artificial Sequence
  Description of Artificial Sequence: Synthetic peptide
FFRKNLLRLTG

SEQ ID NO: 51 - protein, 9 aa, Artificial Sequence
  Description of Artificial Sequence: Synthetic peptide
FRNLLRLTG

SEQ ID NO: 52 - protein, 11 aa, Artificial Sequence
  Description of Artificial Sequence: Synthetic peptide
FFRKNLLRLTG

SEQ ID NO: 53 - protein, 11 aa, Artificial Sequence
  Description of Artificial Sequence: Synthetic peptide
FFRKNWLLLTW

SEQ ID NO: 54 - protein, 11 aa, Artificial Sequence
  Description of Artificial Sequence: Synthetic peptide
FFRKNLLRWTG

SEQ ID NO: 55 - protein, 11 aa, Artificial Sequence
  Description of Artificial Sequence: Synthetic peptide
FFRKNWLRLTW

SEQ ID NO: 56 - protein, 11 aa, Artificial Sequence
  Description of Artificial Sequence: Synthetic peptide
FFRKNWLKLTW

SEQ ID NO: 57 - protein, 11 aa, Artificial Sequence
  Description of Artificial Sequence: Synthetic peptide
FFRKNWIRITW

SEQ ID NO: 58 - protein, 11 aa, Artificial Sequence
  Description of Artificial Sequence: Synthetic peptide
FFRKQWLRLTW

SEQ ID NO: 59 - protein, 11 aa, Artificial Sequence
  Description of Artificial Sequence: Synthetic peptide
FFRKNWLRLTG

SEQ ID NO: 60 - protein, 11 aa, Artificial Sequence
  Description of Artificial Sequence: Synthetic peptide
FFRKNFLRLTF

SEQ ID NO: 61 - protein, 9 aa, Artificial Sequence
  Description of Artificial Sequence: Synthetic peptide
FRNWLRLTW

SEQ ID NO: 62 - protein, 9 aa, Artificial Sequence
  Description of Artificial Sequence: Synthetic peptide
FRNWLKLTW

SEQ ID NO: 63 - protein, 9 aa, Artificial Sequence
  Description of Artificial Sequence: Synthetic peptide
FRNWLRLTG

SEQ ID NO: 64 - protein, 9 aa, Artificial Sequence
  Description of Artificial Sequence: Synthetic peptide
FRNFLRLTF

SEQ ID NO: 65 - protein, 11 aa, Artificial Sequence
  Description of Artificial Sequence: Synthetic peptide
FFRKNWLKLKW

SEQ ID NO: 66 - protein, 11 aa, Artificial Sequence
  Description of Artificial Sequence: Synthetic peptide
FFRKNWLKLRW

SEQ ID NO: 67 - protein, 11 aa, Artificial Sequence
  Description of Artificial Sequence: Synthetic peptide
FFRKNWLKLWK

SEQ ID NO: 68 - protein, 11 aa, Artificial Sequence
  Description of Artificial Sequence: Synthetic peptide
  MOD_RES (1)..(1): Asn, Phe, Gln, or absent
  MOD_RES (2)..(2): Trp, Leu, or Phe
  MOD_RES (3)..(3): Leu or Ile
  MOD_RES (4)..(4): Arg, Leu, or Lys
  MOD_RES (5)..(5): Leu, Trp, or Ile
  MOD_RES (6)..(6): Thr, Leu, Phe, Lys, Arg, or Trp
  MOD_RES (7)..(7): Trp, Gly, Lys, or Phe
XXXXXXXFFRK

SEQ ID NO: 69 - protein, 10 aa, Artificial Sequence
  Description of Artificial Sequence: Synthetic peptide
  MOD_RES (1)..(1): Trp or Phe
  MOD_RES (3)..(3): Arg or Lys
  MOD_RES (6)..(6): Trp, Phe, or Gly
XLXLTXFFRK

SEQ ID NO: 70 - protein, 11 aa, Artificial Sequence
  Description of Artificial Sequence: Synthetic peptide
  MOD_RES (2)..(2): Trp or Phe
  MOD_RES (4)..(4): Arg or Lys
  MOD_RES (7)..(7): Trp, Phe, or Gly
NXLXLTXFFRK

SEQ ID NO: 71 - protein, 10 aa, Artificial Sequence
  Description of Artificial Sequence: Synthetic peptide
  MOD_RES (3)..(3): Arg or Lys
  MOD_RES (6)..(6): Trp or Gly
WLXLTXFFRK

SEQ ID NO: 72 - protein, 11 aa, Artificial Sequence
  Description of Artificial Sequence: Synthetic peptide
  MOD_RES (4)..(4): Arg or Lys
  MOD_RES (7)..(7): Trp or Gly
NWLXLTXFFRK

SEQ ID NO: 73 - protein, 11 aa, Artificial Sequence
  Description of Artificial Sequence: Synthetic peptide
  MOD_RES (3)..(3): Leu or Ile
  MOD_RES (4)..(4): Leu, Arg, or Lys
  MOD_RES (5)..(5): Leu or Ile
  MOD_RES (6)..(6): Thr, Leu, Phe, Lys, Arg, or Trp
  MOD_RES (7)..(7): Trp or Lys
NWXXXXXFFRK

SEQ ID NO: 74 - protein, 11 aa, Artificial Sequence
  Description of Artificial Sequence: Synthetic peptide
NLLRLTGFFRK

SEQ ID NO: 75 - protein, 9 aa, Artificial Sequence
  Description of Artificial Sequence: Synthetic peptide
NLLRLTGFR

SEQ ID NO: 76 - protein, 11 aa, Artificial Sequence
  Description of Artificial Sequence: Synthetic peptide
NWLRLTWFFRK

SEQ ID NO: 77 - protein, 11 aa, Artificial Sequence
  Description of Artificial Sequence: Synthetic peptide
NWLKLTWFFRK

SEQ ID NO: 78 - protein, 11 aa, Artificial Sequence
  Description of Artificial Sequence: Synthetic peptide
NWLRLTGFFRK

SEQ ID NO: 79 - protein, 11 aa, Artificial Sequence
  Description of Artificial Sequence: Synthetic peptide
NFLRLTFFFRK

SEQ ID NO: 80 - protein, 9 aa, Artificial Sequence
  Description of Artificial Sequence: Synthetic peptide
NWLRLTWFR

SEQ ID NO: 81 - protein, 9 aa, Artificial Sequence
  Description of Artificial Sequence: Synthetic peptide
NWLKLTWFR

SEQ ID NO: 82 - protein, 9 aa, Artificial Sequence
  Description of Artificial Sequence: Synthetic peptide
NWLRLTGFR

SEQ ID NO: 83 - protein, 9 aa, Artificial Sequence
  Description of Artificial Sequence: Synthetic peptide
NFLRLTFFR

SEQ ID NO: 84 - protein, 11 aa, Artificial Sequence
  Description of Artificial Sequence: Synthetic peptide
NLLRLTWFFRK

SEQ ID NO: 85 - protein, 11 aa, Artificial Sequence
  Description of Artificial Sequence: Synthetic peptide
NRLLLTGFFRK

SEQ ID NO: 86 - protein, 11 aa, Artificial Sequence
  Description of Artificial Sequence: Synthetic peptide
NWLLLTWFFRK

SEQ ID NO: 87 - protein, 11 aa, Artificial Sequence
  Description of Artificial Sequence: Synthetic peptide
NLLRWTGFFRK

SEQ ID NO: 88 - protein, 11 aa, Artificial Sequence
  Description of Artificial Sequence: Synthetic peptide
NRLWLTGFFRK

SEQ ID NO: 89 - protein, 11 aa, Artificial Sequence
  Description of Artificial Sequence: Synthetic peptide
FWLRLTWFFRK

SEQ ID NO: 90 - protein, 11 aa, Artificial Sequence
  Description of Artificial Sequence: Synthetic peptide
NWLRLLWFFRK

SEQ ID NO: 91 - protein, 11 aa, Artificial Sequence
  Description of Artificial Sequence: Synthetic peptide
NWLRLFWFFRK

SEQ ID NO: 92 - protein, 11 aa, Artificial Sequence
  Description of Artificial Sequence: Synthetic peptide
NWLRLKWFFRK

SEQ ID NO: 93 - protein, 11 aa, Artificial Sequence
  Description of Artificial Sequence: Synthetic peptide
NWIRITWFFRK

SEQ ID NO: 94 - protein, 11 aa, Artificial Sequence
  Description of Artificial Sequence: Synthetic peptide
QWLRLTWFFRK

SEQ ID NO: 95 - protein, 11 aa, Artificial Sequence
  Description of Artificial Sequence: Synthetic peptide
NWLKLKWFFRK

SEQ ID NO: 96 - protein, 11 aa, Artificial Sequence
  Description of Artificial Sequence: Synthetic peptide
NWLKLRWFFRK

SEQ ID NO: 97 - protein, 11 aa, Artificial Sequence
  Description of Artificial Sequence: Synthetic peptide
NWLKLWKFFRK

SEQ ID NO: 98 - protein, 11 aa, Artificial Sequence
  Description of Artificial Sequence: Synthetic peptide
  MOD_RES (7)..(7): phosphoserine
AELGRLSPRAY

SEQ ID NO: 99 - protein, 9 aa, Artificial Sequence
  Description of Artificial Sequence: Synthetic peptide
  MOD_RES (5)..(5): oxidized methionine
  MOD_RES (6)..(6): phosphoserine
AESIMSFHI

SEQ ID NO: 100 - protein, 9 aa, Artificial Sequence
  Description of Artificial Sequence: Synthetic peptide
  MOD_RES (6)..(6): phosphoserine
AESIMSFHI

SEQ ID NO: 101 - protein, 11 aa, Artificial Sequence
  Description of Artificial Sequence: Synthetic peptide
  MOD_RES (3)..(3): phosphoserine
AESLKSLSSEL

SEQ ID NO: 102 - protein, 9 aa, Artificial Sequence
  Description of Artificial Sequence: Synthetic peptide
  MOD_RES (3)..(3): phosphothreonine
AETPDIKLF

SEQ ID NO: 103 - protein, 9 aa, Artificial Sequence
  Description of Artificial Sequence: Synthetic peptide
  MOD_RES (4)..(4): phosphoserine
AGFSFVNPK

SEQ ID NO: 104 - protein, 13 aa, Artificial Sequence
  Description of Artificial Sequence: Synthetic peptide
  MOD_RES (7)..(7): oxidized methionine
  MOD_RES (12)..(12): phosphoserine
AHDPSGMFRSQSF

SEQ ID NO: 105 - protein, 11 aa, Artificial Sequence
  Description of Artificial Sequence: Synthetic peptide
  MOD_RES (7)..(7): phosphoserine
ALDSGASLLHL

SEQ ID NO: 106 - protein, 11 aa, Artificial Sequence
  Description of Artificial Sequence: Synthetic peptide
  MOD_RES (3)..(3): oxidized methionine
  MOD_RES (5)..(5): phosphoserine
ALMGSPQLVAA

SEQ ID NO: 107 - protein, 10 aa, Artificial Sequence
  Description of Artificial Sequence: Synthetic peptide
  MOD_RES (9)..(9): phosphoserine
ALPPGSYASL

SEQ ID NO: 108 - protein, 12 aa, Artificial Sequence
  Description of Artificial Sequence: Synthetic peptide
  MOD_RES (8)..(8): phosphoserine
ALPTPALSPSLM

SEQ ID NO: 109 - protein, 9 aa, Artificial Sequence
  Description of Artificial Sequence: Synthetic peptide
  MOD_RES (4)..(4): phosphoserine
ALSSSFLVL

SEQ ID NO: 110 - protein, 9 aa, Artificial Sequence
  Description of Artificial Sequence: Synthetic peptide
  MOD_RES (5)..(5): phosphoserine
ALSSSFLVL

SEQ ID NO: 111 - protein, 9 aa, Artificial Sequence
  Description of Artificial Sequence: Synthetic peptide
  MOD_RES (4)..(4): phosphothreonine
ALSTPVVEK

SEQ ID NO: 112 - protein, 9 aa, Artificial Sequence
  Description of Artificial Sequence: Synthetic peptide
  MOD_RES (6)..(6): phosphotyrosine
ALVDGYFRL

SEQ ID NO: 113 - protein, 9 aa, Artificial Sequence
  Description of Artificial Sequence: Synthetic peptide
  MOD_RES (3)..(3): oxidized tryptophan
  MOD_RES (4)..(4): phosphoserine
ALWSPGLAK

SEQ ID NO: 114 - protein, 13 aa, Artificial Sequence
  Description of Artificial Sequence: Synthetic peptide
  MOD_RES (2)..(2): oxidized methionine
  MOD_RES (7)..(7): phosphoserine
AMLGSKSPDPYRL

SEQ ID NO: 115 - protein, 9 aa, Artificial Sequence
  Description of Artificial Sequence: Synthetic peptide
  MOD_RES (4)..(4): phosphoserine
APASPFRQL

SEQ ID NO: 116 - protein, 9 aa, Artificial Sequence
  Description of Artificial Sequence: Synthetic peptide
  MOD_RES (4)..(4): phosphoserine
APASPLRPL

SEQ ID NO: 117 - protein, 11 aa, Artificial Sequence
  Description of Artificial Sequence: Synthetic peptide
  MOD_RES (4)..(4): phosphoserine
APASPNHAGVL

SEQ ID NO: 118 - protein, 10 aa, Artificial Sequence
  Description of Artificial Sequence: Synthetic peptide
  MOD_RES (6)..(6): phosphothreonine
APFHLTPTLY

SEQ ID NO: 119 - protein, 10 aa, Artificial Sequence
  Description of Artificial Sequence: Synthetic peptide
  MOD_RES (4)..(4): phosphoserine
APKSPSSEWL

SEQ ID NO: 120 - protein, 10 aa, Artificial Sequence
  Description of Artificial Sequence: Synthetic peptide
  MOD_RES (4)..(4): phosphothreonine
APRTPPGVTF

SEQ ID NO: 121 - protein, 9 aa, Artificial Sequence
  Description of Artificial Sequence: Synthetic peptide
  MOD_RES (3)..(3): phosphoserine
APSSPDVKL

SEQ ID NO: 122 - protein, 9 aa, Artificial Sequence
  Description of Artificial Sequence: Synthetic peptide
  MOD_RES (4)..(4): phosphoserine
APSSPDVKL

SEQ ID NO: 123 - protein, 9 aa, Artificial Sequence
  Description of Artificial Sequence: Synthetic peptide
  MOD_RES (4)..(4): phosphoserine
APTSPLGHL

SEQ ID NO: 124 - protein, 9 aa, Artificial Sequence
  Description of Artificial Sequence: Synthetic peptide
  MOD_RES (4)..(4): phosphoserine
APVSPRPGL

SEQ ID NO: 125 - protein, 9 aa, Artificial Sequence
  Description of Artificial Sequence: Synthetic peptide
  MOD_RES (4)..(4): phosphoserine
  MOD_RES (9)..(9): oxidized methionine
ARFSGFYSM

SEQ ID NO: 126 - protein, 9 aa, Artificial Sequence
  Description of Artificial Sequence: Synthetic peptide
  MOD_RES (4)..(4): phosphoserine
ARFSGFYSM

SEQ ID NO: 127 - protein, 9 aa, Artificial Sequence
  Description of Artificial Sequence: Synthetic peptide
  MOD_RES (4)..(4): phosphoserine
ARFSPKVSL

SEQ ID NO: 128 - protein, 9 aa, Artificial Sequence
  Description of Artificial Sequence: Synthetic peptide
  MOD_RES (5)..(5): phosphoserine
ARGISPIVF

SEQ ID NO: 129 - protein, 10 aa, Artificial Sequence
  Description of Artificial Sequence: Synthetic peptide
  MOD_RES (4)..(4): phosphoserine
ARYSGSYNDY

SEQ ID NO: 130 - protein, 9 aa, Artificial Sequence
  Description of Artificial Sequence: Synthetic peptide
  MOD_RES (8)..(8): phosphoserine
ASFKAELSY

SEQ ID NO: 131 - protein, 10 aa, Artificial Sequence
  Description of Artificial Sequence: Synthetic peptide
  MOD_RES (4)..(4): phosphothreonine
ASFTPTSILK

SEQ ID NO: 132 - protein, 11 aa, Artificial Sequence
  Description of Artificial Sequence: Synthetic peptide
  MOD_RES (4)..(4): phosphothreonine
ASFTPTSILKR

SEQ ID NO: 133 - protein, 9 aa, Artificial Sequence
  Description of Artificial Sequence: Synthetic peptide
  MOD_RES (4)..(4): phosphoserine
ASLSPSVSK

SEQ ID NO: 134 - protein, 10 aa, Artificial Sequence
  Description of Artificial Sequence: Synthetic peptide
  MOD_RES (4)..(4): phosphoserine
ATISPPLQPK

SEQ ID NO: 135 - protein, 12 aa, Artificial Sequence
  Description of Artificial Sequence: Synthetic peptide
  MOD_RES (8)..(8): phosphoserine
AVILPPLSPYFK

SEQ ID NO: 136 - protein, 8 aa, Artificial Sequence
  Description of Artificial Sequence: Synthetic peptide
  MOD_RES (5)..(5): phosphotyrosine
AVLEYLKI

SEQ ID NO: 137 - protein, 11 aa, Artificial Sequence
  Description of Artificial Sequence: Synthetic peptide
  MOD_RES (6)..(6): phosphoserine
AVNQFSPSLAR

SEQ ID NO: 138 - protein, 11 aa, Artificial Sequence
  Description of Artificial Sequence: Synthetic peptide
  MOD_RES (6)..(6): phosphoserine
AVRNFSPTDYY

SEQ ID NO: 139 - protein, 11 aa, Artificial Sequence
  Description of Artificial Sequence: Synthetic peptide
  MOD_RES (8)..(8): phosphothreonine
AVRNFSPTDYY

SEQ ID NO: 140 - protein, 12 aa, Artificial Sequence
  Description of Artificial Sequence: Synthetic peptide
  MOD_RES (6)..(6): phosphoserine
AWRRLSRDSGGY

SEQ ID NO: 141 - protein, 12 aa, Artificial Sequence
  Description of Artificial Sequence: Synthetic peptide
  MOD_RES (6)..(6): phosphothreonine
AYGGLTSPGLSY

SEQ ID NO: 142 - protein, 12 aa, Artificial Sequence
  Description of Artificial Sequence: Synthetic peptide
  MOD_RES (7)..(7): phosphoserine
AYGGLTSPGLSY

SEQ ID NO: 143 - protein, 9 aa, Artificial Sequence
  Description of Artificial Sequence: Synthetic peptide
  MOD_RES (4)..(4): phosphoserine
AYSSYVHQY

SEQ ID NO: 144 - protein, 8 aa, Artificial Sequence
  Description of Artificial Sequence: Synthetic peptide
  MOD_RES (2)..(2): phosphothreonine
CTFGSRQI

SEQ ID NO: 145 - protein, 9 aa, Artificial Sequence
  Description of Artificial Sequence: Synthetic peptide
  MOD_RES (4)..(4): phosphoserine
DFASPFHER

SEQ ID NO: 146 - protein, 10 aa, Artificial Sequence
  Description of Artificial Sequence: Synthetic peptide
  MOD_RES (4)..(4): phosphoserine
DFHSPIVLGR

SEQ ID NO: 147 - protein, 10 aa, Artificial Sequence
  Description of Artificial Sequence: Synthetic peptide
  MOD_RES (4)..(4): phosphoserine
DIASPTFRRL

SEQ ID NO: 148 - protein, 13 aa, Artificial Sequence
  Description of Artificial Sequence: Synthetic peptide
  MOD_RES (7)..(7): phosphoserine
DIIRQPSEEEIIK

SEQ ID NO: 149 - protein, 9 aa, Artificial Sequence
  Description of Artificial Sequence: Synthetic peptide
  MOD_RES (4)..(4): phosphoserine
DIKSVFEAF

SEQ ID NO: 150 - protein, 9 aa, Artificial Sequence
  Description of Artificial Sequence: Synthetic peptide
  MOD_RES (4)..(4): phosphoserine
DILSPRLIR

SEQ ID NO: 151 - protein, 11 aa, Artificial Sequence
  Description of Artificial Sequence: Synthetic peptide
  MOD_RES (6)..(6): phosphoserine
DIRRFSLTTLR

SEQ ID NO: 152 - protein, 9 aa, Artificial Sequence
  Description of Artificial Sequence: Synthetic peptide
  MOD_RES (3)..(3): phosphoserine
DISPPIFRR

SEQ ID NO: 153 - protein, 9 aa, Artificial Sequence
  Description of Artificial Sequence: Synthetic peptide
  MOD_RES (3)..(3): phosphothreonine
DLTLKKEKF

SEQ ID NO: 154 - protein, 12 aa, Artificial Sequence
  Description of Artificial Sequence: Synthetic peptide
  MOD_RES (6)..(6): phosphothreonine
DMLGLTKPAMPM

SEQ ID NO: 155 - protein, 11 aa, Artificial Sequence
  Description of Artificial Sequence: Synthetic peptide
  MOD_RES (4)..(4): phosphoserine
DNFSPDLRVLR

SEQ ID NO: 156 - protein, 9 aa, Artificial Sequence
  Description of Artificial Sequence: Synthetic peptide
  MOD_RES (8)..(8): phosphoserine
DPFGRPTSF

SEQ ID NO: 157 - protein, 9 aa, Artificial Sequence
  Description of Artificial Sequence: Synthetic peptide
  MOD_RES (8)..(8): phosphoserine
DPLIRWDSY

SEQ ID NO: 158 - protein, 9 aa, Artificial Sequence
  Description of Artificial Sequence: Synthetic peptide
  MOD_RES (8)..(8): phosphoserine
DPSLDLHSL

SEQ ID NO: 159 - protein, 11 aa, Artificial Sequence
  Description of Artificial Sequence: Synthetic peptide
  MOD_RES (5)..(5): oxidized methionine
  MOD_RES (7)..(7): phosphoserine
DSDPMLSPRFY

SEQ ID NO: 160 - protein, 11 aa, Artificial Sequence
  Description of Artificial Sequence: Synthetic peptide
  MOD_RES (7)..(7): phosphoserine
DSDPMLSPRFY

SEQ ID NO: 161 - protein, 13 aa, Artificial Sequence
  Description of Artificial Sequence: Synthetic peptide
  MOD_RES (5)..(5): oxidized methionine
  MOD_RES (7)..(7): phosphoserine
DSDPMLSPRFYAY

SEQ ID NO: 162 - protein, 13 aa, Artificial Sequence
  Description of Artificial Sequence: Synthetic peptide
  MOD_RES (7)..(7): phosphoserine
DSDPMLSPRFYAY

SEQ ID NO: 163 - protein, 15 aa, Artificial Sequence
  Description of Artificial Sequence: Synthetic peptide
  MOD_RES (2)..(2): phosphoserine
DSGEGDFLAEGGGVR

SEQ ID NO: 164 - protein, 9 aa, Artificial Sequence
  Description of Artificial Sequence: Synthetic peptide
  MOD_RES (4)..(4): phosphoserine
DSKSPLGFY

SEQ ID NO: 165 - protein, 10 aa, Artificial Sequence
  Description of Artificial Sequence: Synthetic peptide
  MOD_RES (4)..(4): phosphoserine
DTISLASERY

SEQ ID NO: 166 - protein, 9 aa, Artificial Sequence
  Description of Artificial Sequence: Synthetic peptide
  MOD_RES (4)..(4): phosphoserine
DTISPTLGF

SEQ ID NO: 167 - protein, 12 aa, Artificial Sequence
  Description of Artificial Sequence: Synthetic peptide
  MOD_RES (6)..(6): phosphoserine
DTQSGSLLFIGR

SEQ ID NO: 168 - protein, 11 aa, Artificial Sequence
  Description of Artificial Sequence: Synthetic peptide
  MOD_RES (3)..(3): phosphoserine
DTSSLPTVIMR

SEQ ID NO: 169 - protein, 11 aa, Artificial Sequence
  Description of Artificial Sequence: Synthetic peptide
  MOD_RES (4)..(4): phosphoserine
  MOD_RES (10)..(10): oxidized methionine
DTSSLPTVIMR

SEQ ID NO: 170 - protein, 11 aa, Artificial Sequence
  Description of Artificial Sequence: Synthetic peptide
  MOD_RES (4)..(4): phosphoserine
DTSSLPTVIMR

SEQ ID NO: 171 - protein, 10 aa, Artificial Sequence
  Description of Artificial Sequence: Synthetic peptide
  MOD_RES (4)..(4): phosphoserine
DTTSLRTLRI

SEQ ID NO: 172 - protein, 11 aa, Artificial Sequence
  Description of Artificial Sequence: Synthetic peptide
  MOD_RES (4)..(4): phosphoserine
DVASPDGLGRL

SEQ ID NO: 173 - protein, 8 aa, Artificial Sequence
  Description of Artificial Sequence: Synthetic peptide
  MOD_RES (4)..(4): phosphoserine
DVASPTLR

SEQ ID NO: 174 - protein, 9 aa, Artificial Sequence
  Description of Artificial Sequence: Synthetic peptide
  MOD_RES (4)..(4): phosphoserine
DVASPTLRR

SEQ ID NO: 175 - protein, 10 aa, Artificial Sequence
  Description of Artificial Sequence: Synthetic peptide
  MOD_RES (4)..(4): phosphoserine
DVASPTLRRL

SEQ ID NO: 176 - protein, 11 aa, Artificial Sequence
  Description of Artificial Sequence: Synthetic peptide
  MOD_RES (5)..(5): phosphoserine
DVIDSQELSKV

SEQ ID NO: 177 - protein, 10 aa, Artificial Sequence
  Description of Artificial Sequence: Synthetic peptide
  MOD_RES (6)..(6): phosphothreonine
DVYSGTPTKV

SEQ ID NO: 178 - protein, 9 aa, Artificial Sequence
  Description of Artificial Sequence: Synthetic peptide
  MOD_RES (8)..(8): phosphothreonine
DYSPYFKTI

SEQ ID NO: 179 - protein, 9 aa, Artificial Sequence
  Description of Artificial Sequence: Synthetic peptide
  MOD_RES (3)..(3): phosphoserine
EASSPVPYL

SEQ ID NO: 180 - protein, 9 aa, Artificial Sequence
  Description of Artificial Sequence: Synthetic peptide
  MOD_RES (4)..(4): phosphoserine
EASSPVPYL

SEQ ID NO: 181 - protein, 10 aa, Artificial Sequence
  Description of Artificial Sequence: Synthetic peptide
  MOD_RES (6)..(6): phosphothreonine
EEAPQTPVAF

SEQ ID NO: 182 - protein, 9 aa, Artificial Sequence
  Description of Artificial Sequence: Synthetic peptide
  MOD_RES (4)..(4): phosphothreonine
EEDTYEKVF

SEQ ID NO: 183 - protein, 11 aa, Artificial Sequence
  Description of Artificial Sequence: Synthetic peptide
  MOD_RES (4)..(4): phosphoserine
  MOD_RES (10)..(10): oxidized methionine
EEFSPRQAQMF

SEQ ID NO: 184 - protein, 11 aa, Artificial Sequence
  Description of Artificial Sequence: Synthetic peptide
  MOD_RES (4)..(4): phosphoserine
EEFSPRQAQMF

SEQ ID NO: 185 - protein, 11 aa, Artificial Sequence
  Description of Artificial Sequence: Synthetic peptide
  MOD_RES (4)..(4): phosphoserine
EEISPTKFPGL

SEQ ID NO: 186 - protein, 12 aa, Artificial Sequence
  Description of Artificial Sequence: Synthetic peptide
  MOD_RES (4)..(4): phosphoserine
EEISPTKFPGLY

SEQ ID NO: 187 - protein, 11 aa, Artificial Sequence
  Description of Artificial Sequence: Synthetic peptide
  MOD_RES (4)..(4): phosphoserine
EELSPLALGRF

SEQ ID NO: 188 - protein, 10 aa, Artificial Sequence
  Description of Artificial Sequence: Synthetic peptide
  MOD_RES (4)..(4): phosphoserine
EELSPSTVLY

SEQ ID NO: 189 - protein, 10 aa, Artificial Sequence
  Description of Artificial Sequence: Synthetic peptide
  MOD_RES (6)..(6): phosphoserine
EELSPSTVLY

SEQ ID NO: 190 - protein, 9 aa, Artificial Sequence
  Description of Artificial Sequence: Synthetic peptide
  MOD_RES (6)..(6): phosphothreonine
EELSPTAKF

SEQ ID NO: 191 - protein, 9 aa, Artificial Sequence
  Description of Artificial Sequence: Synthetic peptide
  MOD_RES (5)..(5): phosphothreonine
EGPETGYSL

SEQ ID NO: 192 - protein, 11 aa, Artificial Sequence
  Description of Artificial Sequence: Synthetic peptide
  MOD_RES (7)..(7): phosphoserine
EHERSISPLLF

SEQ ID NO: 193 - protein, 10 aa, Artificial Sequence
  Description of Artificial Sequence: Synthetic peptide
  MOD_RES (6)..(6): phosphoserine
EIVNFSPIAR

SEQ ID NO: 194 - protein, 9 aa, Artificial Sequence
  Description of Artificial Sequence: Synthetic peptide
  MOD_RES (8)..(8): phosphoserine
ERLKIRGSL

SEQ ID NO: 195 - protein, 9 aa, Artificial Sequence
  Description of Artificial Sequence: Synthetic peptide
  MOD_RES (8)..(8): phosphoserine
ERVDSLVSL

SEQ ID NO: 196 - protein, 13 aa, Artificial Sequence
  Description of Artificial Sequence: Synthetic peptide
  MOD_RES (6)..(6): phosphotyrosine
ESFSDYPPLGRFA

SEQ ID NO: 197 - protein, 11 aa, Artificial Sequence
  Description of Artificial Sequence: Synthetic peptide
  MOD_RES (4)..(4): phosphoserine
  MOD_RES (9)..(9): oxidized methionine
ESLSPIGDMKV

SEQ ID NO: 198 - protein, 11 aa, Artificial Sequence
  Description of Artificial Sequence: Synthetic peptide
  MOD_RES (4)..(4): phosphoserine
ESLSPIGDMKV

SEQ ID NO: 199 - protein, 10 aa, Artificial Sequence
  Description of Artificial Sequence: Synthetic peptide
  MOD_RES (9)..(9): phosphoserine
ESVYKASLSL

SEQ ID NO: 200 - protein, 10 aa, Artificial Sequence
  Description of Artificial Sequence: Synthetic peptide
  MOD_RES (6)..(6): phosphoserine
ETRRPSYLEW

SEQ ID NO: 201 - protein, 11 aa, Artificial Sequence
  Description of Artificial Sequence: Synthetic peptide
  MOD_RES (7)..(7): phosphoserine
EVIRKGSITEY

SEQ ID NO: 202 - protein, 10 aa, Artificial Sequence
  Description of Artificial Sequence: Synthetic peptide
  MOD_RES (4)..(4): phosphoserine
EVISQHLVSY

SEQ ID NO: 203 - protein, 9 aa, Artificial Sequence
  Description of Artificial Sequence: Synthetic peptide
  MOD_RES (4)..(4): phosphoserine
EVISVLQKY

SEQ ID NO: 204 - protein, 9 aa, Artificial Sequence
  Description of Artificial Sequence: Synthetic peptide
  MOD_RES (8)..(8): phosphoserine
EVLERKISM

SEQ ID NO: 205 - protein, 10 aa, Artificial Sequence
  Description of Artificial Sequence: Synthetic peptide
  MOD_RES (7)..(7): phosphothreonine
FAFPGSTNSL

SEQ ID NO: 206 - protein, 10 aa, Artificial Sequence
  Description of Artificial Sequence: Synthetic peptide
  MOD_RES (9)..(9): phosphoserine
FAFPGSTNSL

SEQ ID NO: 207 - protein, 10 aa, Artificial Sequence
  Description of Artificial Sequence: Synthetic peptide
  MOD_RES (5)..(5): phosphothreonine
FASPTSPPVL

SEQ ID NO: 208 - protein, 10 aa, Artificial Sequence
  Description of Artificial Sequence: Synthetic peptide
  MOD_RES (6)..(6): phosphoserine
FASPTSPPVL

SEQ ID NO: 209 - protein, 9 aa, Artificial Sequence
  Description of Artificial Sequence: Synthetic peptide
  MOD_RES (8)..(8): phosphoserine
FATIKSASL

SEQ ID NO: 210 - protein, 9 aa, Artificial Sequence
  Description of Artificial Sequence: Synthetic peptide
  MOD_RES (8)..(8): phosphoserine
FATIRTASL

SEQ ID NO: 211 - protein, 13 aa, Artificial Sequence
  Description of Artificial Sequence: Synthetic peptide
  MOD_RES (4)..(4): phosphoserine
FAVSPIPGRGGVL

SEQ ID NO: 212 - protein, 11 aa, Artificial Sequence
  Description of Artificial Sequence: Synthetic peptide
  MOD_RES (3)..(3): oxidized tryptophan
  MOD_RES (4)..(4): phosphoserine
FAWSPLAGEKF

SEQ ID NO: 213 - protein, 11 aa, Artificial Sequence
  Description of Artificial Sequence: Synthetic peptide
  MOD_RES (4)..(4): phosphoserine
FAWSPLAGEKF

SEQ ID NO: 214 - protein, 12 aa, Artificial Sequence
  Description of Artificial Sequence: Synthetic peptide
  MOD_RES (4)..(4): phosphoserine
  MOD_RES (11)..(11): oxidized methionine
FAYSPGGAHGML

SEQ ID NO: 215 - protein, 9 aa, Artificial Sequence
  Description of Artificial Sequence: Synthetic peptide
  MOD_RES (4)..(4): phosphothreonine
FFFTARTSF

SEQ ID NO: 216 - protein, 8 aa, Artificial Sequence
  Description of Artificial Sequence: Synthetic peptide
  MOD_RES (7)..(7): phosphothreonine
FGGQRLTL

SEQ ID NO: 217 - protein, 9 aa, Artificial Sequence
  Description of Artificial Sequence: Synthetic peptide
  MOD_RES (8)..(8): phosphoserine
FHGISTVSL

SEQ ID NO: 218 - protein, 8 aa, Artificial Sequence
  Description of Artificial Sequence: Synthetic peptide
  MOD_RES (4)..(4): phosphothreonine
FHVTPLKL

SEQ ID NO: 219 - protein, 11 aa, Artificial Sequence
  Description of Artificial Sequence: Synthetic peptide
  MOD_RES (4)..(4): phosphoserine
FIVSPVPESRL

SEQ ID NO: 220 - protein, 10 aa, Artificial Sequence
  Description of Artificial Sequence: Synthetic peptide
  MOD_RES (4)..(4): phosphoserine
FKVSPLTFGR

SEQ ID NO: 221 - protein, 9 aa, Artificial Sequence
  Description of Artificial Sequence: Synthetic peptide
  MOD_RES (4)..(4): phosphoserine
FLDSAYFRL

SEQ ID NO: 222 - protein, 10 aa, Artificial Sequence
  Description of Artificial Sequence: Synthetic peptide
  MOD_RES (4)..(4): phosphoserine
FLDSGTIRGV

SEQ ID NO: 223 - protein, 11 aa, Artificial Sequence
  Description of Artificial Sequence: Synthetic peptide
  MOD_RES (4)..(4): phosphoserine
FLFSPPEVTGR

SEQ ID NO: 224 - protein, 11 aa, Artificial Sequence
  Description of Artificial Sequence: Synthetic peptide
  MOD_RES (5)..(5): phosphoserine
FLKPSTSGDSL

SEQ ID NO: 225 - protein, 11 aa, Artificial Sequence
  Description of Artificial Sequence: Synthetic peptide
  MOD_RES (7)..(7): phosphoserine
FLKPSTSGDSL

SEQ ID NO: 226 - protein, 11 aa, Artificial Sequence
  Description of Artificial Sequence: Synthetic peptide
  MOD_RES (10)..(10): phosphoserine
FLKPSTSGDSL

SEQ ID NO: 227 - protein, 10 aa, Artificial Sequence
  Description of Artificial Sequence: Synthetic peptide
  MOD_RES (9)..(9): phosphoserine
FLNEKARLSY

SEQ ID NO: 228 - protein, 9 aa, Artificial Sequence
  Description of Artificial Sequence: Synthetic peptide
  MOD_RES (3)..(3): phosphoserine
FLSRSIPSL

SEQ ID NO: 229 - protein, 13 aa, Artificial Sequence
  Description of Artificial Sequence: Synthetic peptide
  MOD_RES (5)..(5): phosphoserine
FPDNSDVSSIGRL

SEQ ID NO: 230 - protein, 13 aa, Artificial Sequence
  Description of Artificial Sequence: Synthetic peptide
  MOD_RES (9)..(9): phosphoserine
FPDNSDVSSIGRL

SEQ ID NO: 231 - protein, 9 aa, Artificial Sequence
  Description of Artificial Sequence: Synthetic peptide
  MOD_RES (8)..(8): phosphoserine
FPLMRSKSL

SEQ ID NO: 232 - protein, 11 aa, Artificial Sequence
  Description of Artificial Sequence: Synthetic peptide
  MOD_RES (4)..(4): phosphoserine
FPLSPTKLSQY

SEQ ID NO: 233 - protein, 9 aa, Artificial Sequence
  Description of Artificial Sequence: Synthetic peptide
  MOD_RES (6)..(6): phosphoserine
FPSMPSPRL

SEQ ID NO: 234 - protein, 9 aa, Artificial Sequence
  Description of Artificial Sequence: Synthetic peptide
  MOD_RES (8)..(8): phosphoserine
FQYSKSPSL

SEQ ID NO: 235 - protein, 11 aa, Artificial Sequence
  Description of Artificial Sequence: Synthetic peptide
  MOD_RES (4)..(4): phosphoserine
FRFSPMGVDHM

SEQ ID NO: 236 - protein, 13 aa, Artificial Sequence
  Description of Artificial Sequence: Synthetic peptide
  MOD_RES (7)..(7): phosphothreonine
FRPPPLTPEDVGF

SEQ ID NO: 237 - protein, 14 aa, Artificial Sequence
  Description of Artificial Sequence: Synthetic peptide
  MOD_RES (12)..(12): phosphothreonine
FRRPDIQYPDATDE

SEQ ID NO: 238 - protein, 10 aa, Artificial Sequence
  Description of Artificial Sequence: Synthetic peptide
  MOD_RES (4)..(4): phosphoserine
FRRSDDMFTF

SEQ ID NO: 239 - protein, 9 aa, Artificial Sequence
  Description of Artificial Sequence: Synthetic peptide
  MOD_RES (7)..(7): phosphothreonine
FRYSGKTEY

SEQ ID NO: 240 - protein, 9 aa, Artificial Sequence
  Description of Artificial Sequence: Synthetic peptide
  MOD_RES (6)..(6): phosphoserine
FSFKKSFKL

SEQ ID NO: 241 - protein, 11 aa, Artificial Sequence
  Description of Artificial Sequence: Synthetic peptide
  MOD_RES (4)..(4): phosphoserine
FSFSPGAGAFR

SEQ ID NO: 242 - protein, 12 aa, Artificial Sequence
  Description of Artificial Sequence: Synthetic peptide
  MOD_RES (6)..(6): phosphoserine
  MOD_RES (9)..(9): oxidized methionine
FSLRYSPGMDAY

SEQ ID NO: 243 - protein, 12 aa, Artificial Sequence
  Description of Artificial Sequence: Synthetic peptide
  MOD_RES (6)..(6): phosphoserine
FSLRYSPGMDAY

SEQ ID NO: 244 - protein, 13 aa, Artificial Sequence
  Description of Artificial Sequence: Synthetic peptide
  MOD_RES (7)..(7): phosphoserine
FSRPSMSPTPLDR

SEQ ID NO: 245 - protein, 9 aa, Artificial Sequence
  Description of Artificial Sequence: Synthetic peptide
  MOD_RES (5)..(5): phosphoserine
FSVDSPRIY

SEQ ID NO: 246 - protein, 9 aa, Artificial Sequence
  Description of Artificial Sequence: Synthetic peptide
  MOD_RES (8)..(8): phosphoserine
FTIFRTISV

SEQ ID NO: 247 - protein, 8 aa, Artificial Sequence
  Description of Artificial Sequence: Synthetic peptide
  MOD_RES (2)..(2): phosphothreonine
FTPPVVKR

SEQ ID NO: 248 - protein, 10 aa, Artificial Sequence
  Description of Artificial Sequence: Synthetic peptide
  MOD_RES (4)..(4): phosphoserine
FVLSPIKEPA

SEQ ID NO: 249 - protein, 10 aa, Artificial Sequence
  Description of Artificial Sequence: Synthetic peptide
  MOD_RES (4)..(4): phosphoserine
FVRSPGTGAF

SEQ ID NO: 250 - protein, 9 aa, Artificial Sequence
  Description of Artificial Sequence: Synthetic peptide
  MOD_RES (3)..(3): phosphothreonine
FVTTPTAEL

SEQ ID NO: 251 - protein, 9 aa, Artificial Sequence
  Description of Artificial Sequence: Synthetic peptide
  MOD_RES (4)..(4): phosphothreonine
FVTTPTAEL

SEQ ID NO: 252 - protein, 9 aa, Artificial Sequence
  Description of Artificial Sequence: Synthetic peptide
  MOD_RES (6)..(6): phosphothreonine
FVTTPTAEL

SEQ ID NO: 253 - protein, 10 aa, Artificial Sequence
  Description of Artificial Sequence: Synthetic peptide
  MOD_RES (4)..(4): phosphoserine
FYYSPSGKKF

SEQ ID NO: 254 - protein, 9 aa, Artificial Sequence
  Description of Artificial Sequence: Synthetic peptide
  MOD_RES (4)..(4): phosphoserine
GALSRYLFR

SEQ ID NO: 255 - protein, 10 aa, Artificial Sequence
  Description of Artificial Sequence: Synthetic peptide
  MOD_RES (6)..(6): phosphoserine
GEDPLSPRAL

SEQ ID NO: 256 - protein, 10 aa, Artificial Sequence
  Description of Artificial Sequence: Synthetic peptide
  MOD_RES (5)..(5): phosphoserine
GELESIGELF

SEQ ID NO: 257 - protein, 9 aa, Artificial Sequence
  Description of Artificial Sequence: Synthetic peptide
  MOD_RES (3)..(3): oxidized methionine
  MOD_RES (4)..(4): phosphoserine
GEMSPQRFF

SEQ ID NO: 258 - protein, 9 aa, Artificial Sequence
  Description of Artificial Sequence: Synthetic peptide
  MOD_RES (4)..(4): phosphoserine
GEMSPQRFF

SEQ ID NO: 259 - protein, 10 aa, Artificial Sequence
  Description of Artificial Sequence: Synthetic peptide
  MOD_RES (3)..(3): oxidized methionine
  MOD_RES (4)..(4): phosphoserine
GEMSPQRFFF

SEQ ID NO: 260 - protein, 9 aa, Artificial Sequence
  Description of Artificial Sequence: Synthetic peptide
  MOD_RES (5)..(5): phosphoserine
GENKSPLLL

SEQ ID NO: 261 - protein, 16 aa, Artificial Sequence
  Description of Artificial Sequence: Synthetic peptide
  MOD_RES (7)..(7): phosphothreonine
GEPRAPTPPSGTEVTL

SEQ ID NO: 262 - protein, 10 aa, Artificial Sequence
  Description of Artificial Sequence: Synthetic peptide
  MOD_RES (4)..(4): phosphoserine
GEPSPPHDIL

SEQ ID NO: 263 - protein, 11 aa, Artificial Sequence
  Description of Artificial Sequence: Synthetic peptide
  MOD_RES (3)..(3): phosphothreonine
GETSPRTKITW

SEQ ID NO: 264 - protein, 11 aa, Artificial Sequence
  Description of Artificial Sequence: Synthetic peptide
  MOD_RES (4)..(4): phosphoserine
GETSPRTKITW

SEQ ID NO: 265 - protein, 11 aa, Artificial Sequence
  Description of Artificial Sequence: Synthetic peptide
  MOD_RES (3)..(3): oxidized tryptophan
  MOD_RES (4)..(4): phosphoserine
GEWSASLPHRF

SEQ ID NO: 266 - protein, 11 aa, Artificial Sequence
  Description of Artificial Sequence: Synthetic peptide
  MOD_RES (3)..(3): oxidized tryptophan
  MOD_RES (6)..(6): phosphoserine
GEWSASLPHRF

SEQ ID NO: 267 - protein, 11 aa, Artificial Sequence
  Description of Artificial Sequence: Synthetic peptide
  MOD_RES (4)..(4): phosphoserine
GEWSASLPHRF

SEQ ID NO: 268 - protein, 10 aa, Artificial Sequence
  Description of Artificial Sequence: Synthetic peptide
  MOD_RES (4)..(4): phosphoserine
GEYSPGTALP

SEQ ID NO: 269 - protein, 10 aa, Artificial Sequence
  Description of Artificial Sequence: Synthetic peptide
  MOD_RES (5)..(5): phosphoserine
GGLTSPGLSY

SEQ ID NO: 270 - protein, 16 aa, Artificial Sequence
  Description of Artificial Sequence: Synthetic peptide
  MOD_RES (15)..(15): phosphoserine
GGSISVQVNSIKFDSE

SEQ ID NO: 271 - protein, 9 aa, Artificial Sequence
  Description of Artificial Sequence: Synthetic peptide
  MOD_RES (4)..(4): phosphoserine
GHGSPFPSL

SEQ ID NO: 272 - protein, 10 aa, Artificial Sequence
  Description of Artificial Sequence: Synthetic peptide
  MOD_RES (6)..(6): phosphothreonine
GIFPGTPLKK

SEQ ID NO: 273 - protein, 10 aa, Artificial Sequence
  Description of Artificial Sequence: Synthetic peptide
  MOD_RES (5)..(5): phosphoserine
GIISSPLTGK

SEQ ID NO: 274 - protein, 10 aa, Artificial Sequence
  Description of Artificial Sequence: Synthetic peptide
  MOD_RES (8)..(8): phosphothreonine
GIISSPLTGK

SEQ ID NO: 275 - protein, 9 aa, Artificial Sequence
  Description of Artificial Sequence: Synthetic peptide
  MOD_RES (3)..(3): oxidized methionine
  MOD_RES (4)..(4): phosphoserine
GIMSPLAKK

SEQ ID NO: 276 - protein, 11 aa, Artificial Sequence
  Description of Artificial Sequence: Synthetic peptide
  MOD_RES (4)..(4): phosphoserine
GLFSPIRSSAF

SEQ ID NO: 277 - protein, 14 aa, Artificial Sequence
  Description of Artificial Sequence: Synthetic peptide
  MOD_RES (4)..(4): phosphoserine
GLLSLSALGSQAHL

SEQ ID NO: 278 - protein, 12 aa, Artificial Sequence
  Description of Artificial Sequence: Synthetic peptide
  MOD_RES (7)..(7): phosphoserine
GLPGGGSPTTFL

SEQ ID NO: 279 - protein, 9 aa, Artificial Sequence
  Description of Artificial Sequence: Synthetic peptide
  MOD_RES (4)..(4): phosphoserine
GLSSLSIHL

SEQ ID NO: 280 - protein, 11 aa, Artificial Sequence
  Description of Artificial Sequence: Synthetic peptide
  MOD_RES (4)..(4): phosphoserine
GLTSPGLSYSL

SEQ ID NO: 281 - protein, 9 aa, Artificial Sequence
  Description of Artificial Sequence: Synthetic peptide
  MOD_RES (3)..(3): phosphothreonine
GLTVSIPGL

SEQ ID NO: 282 - protein, 10 aa, Artificial Sequence
  Description of Artificial Sequence: Synthetic peptide
  MOD_RES (6)..(6): phosphoserine
GMAILSLLLK

SEQ ID NO: 283 - protein, 15 aa, Artificial Sequence
  Description of Artificial Sequence: Synthetic peptide
  MOD_RES (14)..(14): phosphothreonine
GPGHHHKPGLGEGTP

SEQ ID NO: 284 - protein, 9 aa, Artificial Sequence
  Description of Artificial Sequence: Synthetic peptide
  MOD_RES (8)..(8): phosphoserine
GPLSRVKSL

SEQ ID NO: 285 - protein, 9 aa, Artificial Sequence
  Description of Artificial Sequence: Synthetic peptide
  MOD_RES (8)..(8): phosphoserine
GPLVRQISL

SEQ ID NO: 286 - protein, 11 aa, Artificial Sequence
  Description of Artificial Sequence: Synthetic peptide
  MOD_RES (8)..(8): phosphothreonine
GPRAPSPTKPL

SEQ ID NO: 287 - protein, 8 aa, Artificial Sequence
  Description of Artificial Sequence: Synthetic peptide
  MOD_RES (4)..(4): phosphoserine
GPRSASLL

SEQ ID NO: 288 - protein, 10 aa, Artificial Sequence
  Description of Artificial Sequence: Synthetic peptide
  MOD_RES (6)..(6): phosphothreonine
GPRSFTPLSI

SEQ ID NO: 289 - protein, 9 aa, Artificial Sequence
  Description of Artificial Sequence: Synthetic peptide
  MOD_RES (4)..(4): phosphoserine
GPRSPKAWL

SEQ ID NO: 290 - protein, 10 aa, Artificial Sequence
  Description of Artificial Sequence: Synthetic peptide
  MOD_RES (4)..(4): phosphothreonine
GPRTPTQPLL

SEQ ID NO: 291 - protein, 11 aa, Artificial Sequence
  Description of Artificial Sequence: Synthetic peptide
  MOD_RES (4)..(4): phosphoserine
GRNSLSSLPTY

SEQ ID NO: 292 - protein, 9 aa, Artificial Sequence
  Description of Artificial Sequence: Synthetic peptide
  MOD_RES (6)..(6): phosphoserine
GRQSPSFKL

SEQ ID NO: 293 - protein, 10 aa, Artificial Sequence
  Description of Artificial Sequence: Synthetic peptide
  MOD_RES (5)..(5): phosphoserine
GSFASPGRLF

SEQ ID NO: 294 - protein, 9 aa, Artificial Sequence
  Description of Artificial Sequence: Synthetic peptide
  MOD_RES (2)..(2): phosphoserine
GSFRGFPAL

SEQ ID NO: 295 - protein, 10 aa, Artificial Sequence
  Description of Artificial Sequence: Synthetic peptide
  MOD_RES (4)..(4): phosphoserine
GSKSPDPYRL

SEQ ID NO: 296 - protein, 9 aa, Artificial Sequence
  Description of Artificial Sequence: Synthetic peptide
  MOD_RES (4)..(4): phosphoserine
GSRSLYNLR

SEQ ID NO: 297 - protein, 9 aa, Artificial Sequence
  Description of Artificial Sequence: Synthetic peptide
  MOD_RES (8)..(8): phosphoserine
GTFPKALSI

SEQ ID NO: 298 - protein, 12 aa, Artificial Sequence
  Description of Artificial Sequence: Synthetic peptide
  MOD_RES (2)..(2): phosphothreonine
GTPLSQAIIHQY

SEQ ID NO: 299 - protein, 11 aa, Artificial Sequence
  Description of Artificial Sequence: Synthetic peptide
  MOD_RES (4)..(4): phosphothreonine
GTVTPPPRLVK

SEQ ID NO: 300 - protein, 13 aa, Artificial Sequence
  Description of Artificial Sequence: Synthetic peptide
  MOD_RES (7)..(7): phosphoserine
GTYVPSSPTRLAY

SEQ ID NO: 301 - protein, 10 aa, Artificial Sequence
  Description of Artificial Sequence: Synthetic peptide
  MOD_RES (5)..(5): phosphoserine
GVIKSPSWQR

SEQ ID NO: 302 - protein, 10 aa, Artificial Sequence
  Description of Artificial Sequence: Synthetic peptide
  MOD_RES (4)..(4): phosphoserine
GVISPQELLK

SEQ ID NO: 303 - protein, 11 aa, Artificial Sequence
  Description of Artificial Sequence: Synthetic peptide
  MOD_RES (4)..(4): phosphoserine
GVISPQELLKK

SEQ ID NO: 304 - protein, 11 aa, Artificial Sequence
  Description of Artificial Sequence: Synthetic peptide
  MOD_RES (4)..(4): phosphoserine
GVLSPDTISSK

SEQ ID NO: 305 - protein, 9 aa, Artificial Sequence
  Description of Artificial Sequence: Synthetic peptide
  MOD_RES (3)..(3): oxidized methionine
  MOD_RES (4)..(4): phosphothreonine
GVMTPLIKR

SEQ ID NO: 306 - protein, 9 aa, Artificial Sequence
  Description of Artificial Sequence: Synthetic peptide
  MOD_RES (4)..(4): phosphothreonine
GVMTPLIKR

SEQ ID NO: 307 - protein, 10 aa, Artificial Sequence
  Description of Artificial Sequence: Synthetic peptide
  MOD_RES (4)..(4): phosphoserine
HEFSSPSHLL

SEQ ID NO: 308 - protein, 10 aa, Artificial Sequence
  Description of Artificial Sequence: Synthetic peptide
  MOD_RES (5)..(5): phosphoserine
HEFSSPSHLL

SEQ ID NO: 309 - protein, 9 aa, Artificial Sequence
  Description of Artificial Sequence: Synthetic peptide
  MOD_RES (4)..(4): phosphoserine
HELSDITEL

SEQ ID NO: 310 - protein, 9 aa, Artificial Sequence
  Description of Artificial Sequence: Synthetic peptide
  MOD_RES (6)..(6): phosphoserine
HERSISPLL

SEQ ID NO: 311 - protein, 9 aa, Artificial Sequence
  Description of Artificial Sequence: Synthetic peptide
  MOD_RES (4)..(4): phosphoserine
HFDSPPHLL

SEQ ID NO: 312 - protein, 12 aa, Artificial Sequence
  Description of Artificial Sequence: Synthetic peptide
  MOD_RES (11)..(11): phosphothreonine
HHHKPGLGEGTP

SEQ ID NO: 313 - protein, 10 aa, Artificial Sequence
  Description of Artificial Sequence: Synthetic peptide
  MOD_RES (9)..(9): phosphothreonine
HHPGLGEGTP

SEQ ID NO: 314 - protein, 9 aa, Artificial Sequence
  Description of Artificial Sequence: Synthetic peptide
  MOD_RES (4)..(4): phosphoserine
HKISDYFEY

SEQ ID NO: 315 - protein, 10 aa, Artificial Sequence
  Description of Artificial Sequence: Synthetic peptide
  MOD_RES (5)..(5): phosphothreonine
HLLETTPKSE

SEQ ID NO: 316 - protein, 10 aa, Artificial Sequence
  Description of Artificial Sequence: Synthetic peptide
  MOD_RES (6)..(6): phosphothreonine
HLLETTPKSE

SEQ ID NO: 317 - protein, 9 aa, Artificial Sequence
  Description of Artificial Sequence: Synthetic peptide
  MOD_RES (6)..(6): phosphothreonine
HLLSPTKGI

SEQ ID NO: 318 - protein, 9 aa, Artificial Sequence
  Description of Artificial Sequence: Synthetic peptide
  MOD_RES (4)..(4): phosphoserine
HLNSLDVQL

SEQ ID NO: 319 - protein, 11 aa, Artificial Sequence
  Description of Artificial Sequence: Synthetic peptide
  MOD_RES (4)..(4): phosphoserine
HLPSPPLTQEV

SEQ ID NO: 320 - protein, 9 aa, Artificial Sequence
  Description of Artificial Sequence: Synthetic peptide
  MOD_RES (4)..(4): phosphoserine
HLSSFTMKL

SEQ ID NO: 321 - protein, 9 aa, Artificial Sequence
  Description of Artificial Sequence: Synthetic peptide
  MOD_RES (4)..(4): phosphoserine
HPISPYEHL

SEQ ID NO: 322 - protein, 10 aa, Artificial Sequence
  Description of Artificial Sequence: Synthetic peptide
  MOD_RES (4)..(4): phosphoserine
HPISPYEHLL

SEQ ID NO: 323 - protein, 9 aa, Artificial Sequence
  Description of Artificial Sequence: Synthetic peptide
  MOD_RES (4)..(4): phosphoserine
HPISSEELL

SEQ ID NO: 324 - protein, 9 aa, Artificial Sequence
  Description of Artificial Sequence: Synthetic peptide
  MOD_RES (5)..(5): phosphoserine
HPISSEELL

SEQ ID NO: 325 - protein, 13 aa, Artificial Sequence
  Description of Artificial Sequence: Synthetic peptide
  MOD_RES (4)..(4): phosphoserine
HPISSEELLSLKY

SEQ ID NO: 326 - protein, 13 aa, Artificial Sequence
  Description of Artificial Sequence: Synthetic peptide
  MOD_RES (5)..(5): phosphoserine
HPISSEELLSLKY

SEQ ID NO: 327 - protein, 15 aa, Artificial Sequence
  Description of Artificial Sequence: Synthetic peptide
  MOD_RES (8)..(8): phosphoserine
HPRPVPDSPVSVTRL

SEQ ID NO: 328 - protein, 12 aa, Artificial Sequence
  Description of Artificial Sequence: Synthetic peptide
  MOD_RES (4)..(4): phosphoserine
HPRSPNVLSVAL

SEQ ID NO: 329 - protein, 9 aa, Artificial Sequence
  Description of Artificial Sequence: Synthetic peptide
  MOD_RES (3)..(3): phosphoserine
HPSLSAPAL

SEQ ID NO: 330 - protein, 9 aa, Artificial Sequence
  Description of Artificial Sequence: Synthetic peptide
  MOD_RES (5)..(5): phosphoserine
HPSLSAPAL

SEQ ID NO: 331 - protein, 9 aa, Artificial Sequence
  Description of Artificial Sequence: Synthetic peptide
  MOD_RES (8)..(8): phosphoserine
HPTLQAPSL

SEQ ID NO: 332 - protein, 10 aa, Artificial Sequence
  Description of Artificial Sequence: Synthetic peptide
  MOD_RES (6)..(6): phosphoserine
HPYRNSDPVI

SEQ ID NO: 333 - protein, 9 aa, Artificial Sequence
  Description of Artificial Sequence: Synthetic peptide
  MOD_RES (4)..(4): phosphoserine
  MOD_RES (9)..(9): oxidized tryptophan
HQFSLKENW

SEQ ID NO: 334 - protein, 9 aa, Artificial Sequence
  Description of Artificial Sequence: Synthetic peptide
  MOD_RES (8)..(8): phosphothreonine
HQGKFLQTF

SEQ ID NO: 335 - protein, 9 aa, Artificial Sequence
  Description of Artificial Sequence: Synthetic peptide
  MOD_RES (4)..(4): phosphoserine
HRASKVLFL

SEQ ID NO: 336 - protein, 10 aa, Artificial Sequence
  Description of Artificial Sequence: Synthetic peptide
  MOD_RES (4)..(4): phosphoserine
  MOD_RES (8)..(8): oxidized methionine
HRDSFSRMSL

SEQ ID NO: 337 - protein, 10 aa, Artificial Sequence
  Description of Artificial Sequence: Synthetic peptide
  MOD_RES (4)..(4): phosphoserine
HRDSFSRMSL

SEQ ID NO: 338 - protein, 9 aa, Artificial Sequence
  Description of Artificial Sequence: Synthetic peptide
  MOD_RES (4)..(4): phosphoserine
  MOD_RES (5)..(5): oxidized methionine
HRNSMKVFL

SEQ ID NO: 339 - protein, 9 aa, Artificial Sequence
  Description of Artificial Sequence: Synthetic peptide
  MOD_RES (4)..(4): phosphoserine
HRVSVILKL

SEQ ID NO: 340 - protein, 13 aa, Artificial Sequence
  Description of Artificial Sequence: Synthetic peptide
  MOD_RES (9)..(9): phosphoserine
HSDKRRPPSAELY

SEQ ID NO: 341 - protein, 11 aa, Artificial Sequence
  Description of Artificial Sequence: Synthetic peptide
  MOD_RES (4)..(4): phosphoserine
HSLSLDDIRLY

SEQ ID NO: 342 - protein, 9 aa, Artificial Sequence
  Description of Artificial Sequence: Synthetic peptide
  MOD_RES (4)..(4): phosphoserine
HSVSPDPVL

SEQ ID NO: 343 - protein, 9 aa, Artificial Sequence
  Description of Artificial Sequence: Synthetic peptide
  MOD_RES (4)..(4): phosphoserine
HTISPLDLA

SEQ ID NO: 344 - protein, 10 aa, Artificial Sequence
  Description of Artificial Sequence: Synthetic peptide
  MOD_RES (4)..(4): phosphoserine
HTISPLDLAK

SEQ ID NO: 345 - protein, 11 aa, Artificial Sequence
  Description of Artificial Sequence: Synthetic peptide
  MOD_RES (4)..(4): phosphoserine
HTISPLDLAKL

SEQ ID NO: 346 - protein, 9 aa, Artificial Sequence
  Description of Artificial Sequence: Synthetic peptide
  MOD_RES (4)..(4): phosphoserine
HTISPSFQL

SEQ ID NO: 347 - protein, 9 aa, Artificial Sequence
  Description of Artificial Sequence: Synthetic peptide
  MOD_RES (6)..(6): phosphoserine
HTISPSFQL

SEQ ID NO: 348 - protein, 10 aa, Artificial Sequence
  Description of Artificial Sequence: Synthetic peptide
  MOD_RES (8)..(8): phosphothreonine
HVSLITPTKR

SEQ ID NO: 349 - protein, 9 aa, Artificial Sequence
  Description of Artificial Sequence: Synthetic peptide
  MOD_RES (4)..(4): phosphoserine
HYFSPFRPY

SEQ ID NO: 350 - protein, 11 aa, Artificial Sequence
  Description of Artificial Sequence: Synthetic peptide
  MOD_RES (3)..(3): phosphoserine
HYSSRLGSAIF

SEQ ID NO: 351 - protein, 11 aa, Artificial Sequence
  Description of Artificial Sequence: Synthetic peptide
  MOD_RES (4)..(4): phosphoserine
HYSSRLGSAIF

SEQ ID NO: 352 - protein, 11 aa, Artificial Sequence
  Description of Artificial Sequence: Synthetic peptide
  MOD_RES (8)..(8): phosphoserine
HYSSRLGSAIF

SEQ ID NO: 353 - protein, 9 aa, Artificial Sequence
  Description of Artificial Sequence: Synthetic peptide
  MOD_RES (6)..(6): phosphoserine
IAATKSLSV

SEQ ID NO: 354 - protein, 9 aa, Artificial Sequence
  Description of Artificial Sequence: Synthetic peptide
  MOD_RES (8)..(8): phosphoserine
IEIERILSV

SEQ ID NO: 355 - protein, 9 aa, Artificial Sequence
  Description of Artificial Sequence: Synthetic peptide
  MOD_RES (8)..(8): phosphoserine
IFDLQKTSL

SEQ ID NO: 356 - protein, 12 aa, Artificial Sequence
  Description of Artificial Sequence: Synthetic peptide
  MOD_RES (4)..(4): phosphoserine
IIQSPSSTGLLK

SEQ ID NO: 357 - protein, 11 aa, Artificial Sequence
  Description of Artificial Sequence: Synthetic peptide
  MOD_RES (8)..(8): phosphoserine
ILGPPPPSFHL

SEQ ID NO: 358 - protein, 8 aa, Artificial Sequence
  Description of Artificial Sequence: Synthetic peptide
  MOD_RES (4)..(4): phosphothreonine
ILLTDLII

SEQ ID NO: 359 - protein, 10 aa, Artificial Sequence
  Description of Artificial Sequence: Synthetic peptide
  MOD_RES (9)..(9): phosphotyrosine
IMKNLQAHYE

SEQ ID NO: 360 - protein, 8 aa, Artificial Sequence
  Description of Artificial Sequence: Synthetic peptide
  MOD_RES (7)..(7): phosphoserine
IPHQRSSL

SEQ ID NO: 361 - protein, 9 aa, Artificial Sequence
  Description of Artificial Sequence: Synthetic peptide
  MOD_RES (4)..(4): phosphoserine
IPKSKFLAL

SEQ ID NO: 362 - protein, 9 aa, Artificial Sequence
  Description of Artificial Sequence: Synthetic peptide
  MOD_RES (4)..(4): phosphothreonine
IPMTPTSSF

SEQ ID NO: 363 - protein, 9 aa, Artificial Sequence
  Description of Artificial Sequence: Synthetic peptide
  MOD_RES (6)..(6): phosphothreonine
IPMTPTSSF

SEQ ID NO: 364 - protein, 9 aa, Artificial Sequence
  Description of Artificial Sequence: Synthetic peptide
  MOD_RES (6)..(6): phosphoserine
IPRPLSLIG

SEQ ID NO: 365 - protein, 10 aa, Artificial Sequence
  Description of Artificial Sequence: Synthetic peptide
  MOD_RES (4)..(4): phosphoserine
IPRSFRHLSF

SEQ ID NO: 366 - protein, 9 aa, Artificial Sequence
  Description of Artificial Sequence: Synthetic peptide
  MOD_RES (3)..(3): phosphoserine
  MOD_RES (4)..(4): oxidized methionine
IPSMSHVHL

SEQ ID NO: 367 - protein, 9 aa, Artificial Sequence
  Description of Artificial Sequence: Synthetic peptide
  MOD_RES (3)..(3): phosphoserine
IPSMSHVHL

SEQ ID NO: 368 - protein, 9 aa, Artificial Sequence
  Description of Artificial Sequence: Synthetic peptide
  MOD_RES (3)..(3): phosphoserine
  MOD_RES (9)..(9): oxidized methionine
IPSPLQPEM

SEQ ID NO: 369 - protein, 9 aa, Artificial Sequence
  Description of Artificial Sequence: Synthetic peptide
  MOD_RES (3)..(3): phosphoserine
IPSPLQPEM

SEQ ID NO: 370 - protein, 9 aa, Artificial Sequence
  Description of Artificial Sequence: Synthetic peptide
  MOD_RES (8)..(8): phosphoserine
IPVSKPLSL

SEQ ID NO: 371 - protein, 9 aa, Artificial Sequence
  Description of Artificial Sequence: Synthetic peptide
  MOD_RES (4)..(4): phosphoserine
IPVSRDWEL

SEQ ID NO: 372 - protein, 9 aa, Artificial Sequence
  Description of Artificial Sequence: Synthetic peptide
  MOD_RES (8)..(8): phosphoserine
IRFGRKPSL

SEQ ID NO: 373 - protein, 9 aa, Artificial Sequence
  Description of Artificial Sequence: Synthetic peptide
  MOD_RES (4)..(4): phosphoserine
IRPSVLGPL

SEQ ID NO: 374 - protein, 9 aa, Artificial Sequence
  Description of Artificial Sequence: Synthetic peptide
  MOD_RES (4)..(4): phosphoserine
IRRSYFEVF

SEQ ID NO: 375 - protein, 8 aa, Artificial Sequence
  Description of Artificial Sequence: Synthetic peptide
  MOD_RES (7)..(7): phosphoserine
IRYSGHSL

SEQ ID NO: 376 - protein, 10 aa, Artificial Sequence
  Description of Artificial Sequence: Synthetic peptide
  MOD_RES (6)..(6): phosphoserine
ISKKLSFLSW

SEQ ID NO: 377 - protein, 9 aa, Artificial Sequence
  Description of Artificial Sequence: Synthetic peptide
  MOD_RES (8)..(8): phosphoserine
ISLDKLVSI

SEQ ID NO: 378 - protein, 9 aa, Artificial Sequence
  Description of Artificial Sequence: Synthetic peptide
  MOD_RES (2)..(2): phosphoserine
ISSLTTLSI

SEQ ID NO: 379 - protein, 9 aa, Artificial Sequence
  Description of Artificial Sequence: Synthetic peptide
  MOD_RES (3)..(3): phosphoserine
ISSLTTLSI

SEQ ID NO: 380 - protein, 9 aa, Artificial Sequence
  Description of Artificial Sequence: Synthetic peptide
  MOD_RES (3)..(3): phosphoserine
  MOD_RES (5)..(5): oxidized methionine
ISSSMHSLY

SEQ ID NO: 381 - protein, 9 aa, Artificial Sequence
  Description of Artificial Sequence: Synthetic peptide
  MOD_RES (3)..(3): phosphoserine
ISSSMHSLY

SEQ ID NO: 382 - protein, 9 aa, Artificial Sequence
  Description of Artificial Sequence: Synthetic peptide
  MOD_RES (4)..(4): phosphoserine
  MOD_RES (5)..(5): oxidized methionine
ISSSMHSLY

SEQ ID NO: 383 - protein, 9 aa, Artificial Sequence
  Description of Artificial Sequence: Synthetic peptide
  MOD_RES (4)..(4): phosphothreonine
ITITPPEKY

SEQ ID NO: 384 - protein, 10 aa, Artificial Sequence
  Description of Artificial Sequence: Synthetic peptide
  MOD_RES (5)..(5): phosphoserine
ITLLSPKHKY

SEQ ID NO: 385 - protein, 13 aa, Artificial Sequence
  Description of Artificial Sequence: Synthetic peptide
  MOD_RES (2)..(2): phosphothreonine
  MOD_RES (13)..(13): oxidized methionine
ITPPSSEKLVSVM

SEQ ID NO: 386 - protein, 13 aa, Artificial Sequence
  Description of Artificial Sequence: Synthetic peptide
  MOD_RES (2)..(2): phosphothreonine
ITPPSSEKLVSVM

SEQ ID NO: 387 - protein, 9 aa, Artificial Sequence
  Description of Artificial Sequence: Synthetic peptide
  MOD_RES (4)..(4): phosphoserine
ITTSPITVR

SEQ ID NO: 388 - protein, 10 aa, Artificial Sequence
  Description of Artificial Sequence: Synthetic peptide
  MOD_RES (4)..(4): phosphoserine
ITTSPITVRK

SEQ ID NO: 389 - protein, 9 aa, Artificial Sequence
  Description of Artificial Sequence: Synthetic peptide
  MOD_RES (4)..(4): phosphoserine
ITYSPKLER

SEQ ID NO: 390 - protein, 9 aa, Artificial Sequence
  Description of Artificial Sequence: Synthetic peptide
  MOD_RES (6)..(6): phosphoserine
IVLPLSLQR

SEQ ID NO: 391 - protein, 9 aa, Artificial Sequence
  Description of Artificial Sequence: Synthetic peptide
  MOD_RES (3)..(3): phosphoserine
IVSSLRLAY

SEQ ID NO: 392 - protein, 9 aa, Artificial Sequence
  Description of Artificial Sequence: Synthetic peptide
  MOD_RES (4)..(4): phosphoserine
IVSSLRLAY

SEQ ID NO: 393 - protein, 9 aa, Artificial Sequence
  Description of Artificial Sequence: Synthetic peptide
  MOD_RES (4)..(4): phosphoserine
IYDSVKVYF

SEQ ID NO: 394 - protein, 10 aa, Artificial Sequence
  Description of Artificial Sequence: Synthetic peptide
  MOD_RES (6)..(6): phosphoserine
IYRSQSPHYF

SEQ ID NO: 395 - protein, 13 aa, Artificial Sequence
  Description of Artificial Sequence: Synthetic peptide
  MOD_RES (4)..(4): phosphoserine
KAFSESGSNLHAL

SEQ ID NO: 396 - protein, 10 aa, Artificial Sequence
  Description of Artificial Sequence: Synthetic peptide
  MOD_RES (4)..(4): phosphoserine
KAFSPVRSVR

SEQ ID NO: 397 - protein, 11 aa, Artificial Sequence
  Description of Artificial Sequence: Synthetic peptide
  MOD_RES (4)..(4): phosphoserine
KAFSPVRSVRK

SEQ ID NO: 398 - protein, 10 aa, Artificial Sequence
  Description of Artificial Sequence: Synthetic peptide
  MOD_RES (4)..(4): phosphothreonine
KAITPPQQPY

SEQ ID NO: 399 - protein, 10 aa, Artificial Sequence
  Description of Artificial Sequence: Synthetic peptide
  MOD_RES (4)..(4): phosphoserine
KASSPGHPAF

SEQ ID NO: 400 - protein, 9 aa, Artificial Sequence
  Description of Artificial Sequence: Synthetic peptide
  MOD_RES (4)..(4): phosphoserine
KAVSFHLVH

SEQ ID NO: 401 - protein, 7 aa, Artificial Sequence
  Description of Artificial Sequence: Synthetic peptide
  MOD_RES (4)..(4): phosphoserine
KAVSLFL

SEQ ID NO: 402 - protein, 11 aa, Artificial Sequence
  Description of Artificial Sequence: Synthetic peptide
  MOD_RES (4)..(4): phosphothreonine
KAYTPVVVTQW

SEQ ID NO: 403 - protein, 9 aa, Artificial Sequence
  Description of Artificial Sequence: Synthetic peptide
  MOD_RES (4)..(4): phosphoserine
KEDSFLQRY

SEQ ID NO: 404 - protein, 9 aa, Artificial Sequence
  Description of Artificial Sequence: Synthetic peptide
  MOD_RES (3)..(3): oxidized methionine
  MOD_RES (6)..(6): phosphothreonine
KEMSPTRQL

SEQ ID NO: 405 - protein, 9 aa, Artificial Sequence
  Description of Artificial Sequence: Synthetic peptide
  MOD_RES (3)..(3): phosphoserine
KESEVFYEL

SEQ ID NO: 406 - protein, 9 aa, Artificial Sequence
  Description of Artificial Sequence: Synthetic peptide
  MOD_RES (3)..(3): phosphoserine
KESTLHLVL

SEQ ID NO: 407 - protein, 9 aa, Artificial Sequence
  Description of Artificial Sequence: Synthetic peptide
  MOD_RES (4)..(4): phosphothreonine
KESTLHLVL

SEQ ID NO: 408 - protein, 10 aa, Artificial Sequence
  Description of Artificial Sequence: Synthetic peptide
  MOD_RES (4)..(4): phosphoserine
KFLSPAQYLY

SEQ ID NO: 409 - protein, 10 aa, Artificial Sequence
  Description of Artificial Sequence: Synthetic peptide
  MOD_RES (6)..(6): phosphoserine
KFRDLSPPRY

SEQ ID NO: 410 - protein, 9 aa, Artificial Sequence
  Description of Artificial Sequence: Synthetic peptide
  MOD_RES (3)..(3): phosphoserine
KFSLRAAEF

SEQ ID NO: 411 - protein, 9 aa, Artificial Sequence
  Description of Artificial Sequence: Synthetic peptide
  MOD_RES (4)..(4): phosphoserine
KGFSGTFQL

SEQ ID NO: 412 - protein, 9 aa, Artificial Sequence
  Description of Artificial Sequence: Synthetic peptide
  MOD_RES (8)..(8): phosphoserine
KIFERATSF

SEQ ID NO: 413 - protein, 13 aa, Artificial Sequence
  Description of Artificial Sequence: Synthetic peptide
  MOD_RES (4)..(4): phosphoserine
KIFSKQQGKAFQR

SEQ ID NO: 414 - protein, 8 aa, Artificial Sequence
  Description of Artificial Sequence: Synthetic peptide
  MOD_RES (4)..(4): phosphoserine
KIISIFSG

SEQ ID NO: 415 - protein, 11 aa, Artificial Sequence
  Description of Artificial Sequence: Synthetic peptide
  MOD_RES (4)..(4): phosphoserine
KIISIFSGTEK

SEQ ID NO: 416 - protein, 10 aa, Artificial Sequence
  Description of Artificial Sequence: Synthetic peptide
  MOD_RES (4)..(4): phosphoserine
KIKSLEEIYL

SEQ ID NO: 417 - protein, 9 aa, Artificial Sequence
  Description of Artificial Sequence: Synthetic peptide
  MOD_RES (4)..(4): phosphoserine
KINSLAHLR

SEQ ID NO: 418 - protein, 9 aa, Artificial Sequence
  Description of Artificial Sequence: Synthetic peptide
  MOD_RES (4)..(4): phosphoserine
KISSFTSLK

SEQ ID NO: 419 - protein, 9 aa, Artificial Sequence
  Description of Artificial Sequence: Synthetic peptide
  MOD_RES (6)..(6): phosphothreonine
KISSFTSLK

SEQ ID NO: 420 - protein, 9 aa, Artificial Sequence
  Description of Artificial Sequence: Synthetic peptide
  MOD_RES (7)..(7): phosphoserine
KISSFTSLK

SEQ ID NO: 421 - protein, 9 aa, Artificial Sequence
  Description of Artificial Sequence: Synthetic peptide
  MOD_RES (4)..(4): phosphoserine
KISSLEIKL

SEQ ID NO: 422 - protein, 10 aa, Artificial Sequence
  Description of Artificial Sequence: Synthetic peptide
  MOD_RES (4)..(4): phosphoserine
KKLSLLNGGL

SEQ ID NO: 423 - protein, 9 aa, Artificial Sequence
  Description of Artificial Sequence: Synthetic peptide
  MOD_RES (8)..(8): phosphoserine
KLEGPDVSL

SEQ ID NO: 424 - protein, 10 aa, Artificial Sequence
  Description of Artificial Sequence: Synthetic peptide
  MOD_RES (6)..(6): phosphoserine
KLFHGSLEEL

SEQ ID NO: 425 - protein, 10 aa, Artificial Sequence
  Description of Artificial Sequence: Synthetic peptide
  MOD_RES (6)..(6): phosphoserine
KLFPGSPAIY

SEQ ID NO: 426 - protein, 10 aa, Artificial Sequence
  Description of Artificial Sequence: Synthetic peptide
  MOD_RES (4)..(4): phosphoserine
KLHSLIGLGI

SEQ ID NO: 427 - protein, 11 aa, Artificial Sequence
  Description of Artificial Sequence: Synthetic peptide
  MOD_RES (8)..(8): phosphoserine
KLIDIVSSQKV

SEQ ID NO: 428 - protein, 9 aa, Artificial Sequence
  Description of Artificial Sequence: Synthetic peptide
  MOD_RES (4)..(4): phosphoserine
KLKSFTYEY

SEQ ID NO: 429 - protein, 11 aa, Artificial Sequence
  Description of Artificial Sequence: Synthetic peptide
  MOD_RES (7)..(7): phosphoserine
KLLDFGSLSNL

SEQ ID NO: 430 - protein, 12 aa, Artificial Sequence
  Description of Artificial Sequence: Synthetic peptide
  MOD_RES (11)..(11): phosphoserine
KLLEGEESRISL

SEQ ID NO: 431 - protein, 10 aa, Artificial Sequence
  Description of Artificial Sequence: Synthetic peptide
  MOD_RES (4)..(4): phosphoserine
KLLSPILARY

SEQ ID NO: 432 - protein, 9 aa, Artificial Sequence
  Description of Artificial Sequence: Synthetic peptide
  MOD_RES (4)..(4): phosphoserine
KLLSTALHV

SEQ ID NO: 433 - protein, 9 aa, Artificial Sequence
  Description of Artificial Sequence: Synthetic peptide
  MOD_RES (4)..(4): phosphoserine
KLLSYIQRL

SEQ ID NO: 434 - protein, 11 aa, Artificial Sequence
  Description of Artificial Sequence: Synthetic peptide
  MOD_RES (4)..(4): phosphoserine
KLMSDVEDVSL

SEQ ID NO: 435 - protein, 10 aa, Artificial Sequence
  Description of Artificial Sequence: Synthetic peptide
  MOD_RES (4)..(4): phosphoserine
KLMSLGDIRL

SEQ ID NO: 436 - protein, 11 aa, Artificial Sequence
  Description of Artificial Sequence: Synthetic peptide
  MOD_RES (3)..(3): oxidized methionine
  MOD_RES (4)..(4): phosphoserine
KLMSPKADVKL

SEQ ID NO: 437 - protein, 11 aa, Artificial Sequence
  Description of Artificial Sequence: Synthetic peptide
  MOD_RES (4)..(4): phosphoserine
KLMSPVLKQHL

SEQ ID NO: 438 - protein, 9 aa, Artificial Sequence
  Description of Artificial Sequence: Synthetic peptide
  MOD_RES (6)..(6): phosphoserine
KLQEFSKEE

SEQ ID NO: 439 - protein, 11 aa, Artificial Sequence
  Description of Artificial Sequence: Synthetic peptide
  MOD_RES (6)..(6): phosphothreonine
KLRIQTDGDKY

SEQ ID NO: 440 - protein, 10 aa, Artificial Sequence
  Description of Artificial Sequence: Synthetic peptide
  MOD_RES (4)..(4): phosphoserine
KLSSGLLPKL

SEQ ID NO: 441 - protein, 12 aa, Artificial Sequence
  Description of Artificial Sequence: Synthetic peptide
  MOD_RES (3)..(3): oxidized tryptophan
  MOD_RES (4)..(4): phosphothreonine
KLWTLVSEQTRV

SEQ ID NO: 442 - protein, 12 aa, Artificial Sequence
  Description of Artificial Sequence: Synthetic peptide
  MOD_RES (4)..(4): phosphothreonine
KLWTLVSEQTRV

SEQ ID NO: 443 - protein, 10 aa, Artificial Sequence
  Description of Artificial Sequence: Synthetic peptide
  MOD_RES (7)..(7): phosphoserine
KLYRPGSVAY

SEQ ID NO: 444 - protein, 9 aa, Artificial Sequence
  Description of Artificial Sequence: Synthetic peptide
  MOD_RES (4)..(4): phosphoserine
KLYSISSQV

SEQ ID NO: 445 - protein, 10 aa, Artificial Sequence
  Description of Artificial Sequence: Synthetic peptide
  MOD_RES (4)..(4): phosphoserine
KLYSPTSKAL

SEQ ID NO: 446 - protein, 10 aa, Artificial Sequence
  Description of Artificial Sequence: Synthetic peptide
  MOD_RES (6)..(6): phosphothreonine
KLYSPTSKAL

SEQ ID NO: 447 - protein, 9 aa, Artificial Sequence
  Description of Artificial Sequence: Synthetic peptide
  MOD_RES (5)..(5): phosphotyrosine
KLYTYIQSR

SEQ ID NO: 448 - protein, 10 aa, Artificial Sequence
  Description of Artificial Sequence: Synthetic peptide
  MOD_RES (5)..(5): phosphotyrosine
KLYTYIQSRF

SEQ ID NO: 449 - protein, 10 aa, Artificial Sequence
  Description of Artificial Sequence: Synthetic peptide
  MOD_RES (2)..(2): oxidized methionine
  MOD_RES (4)..(4): phosphoserine
KMDSFLDMQL

SEQ ID NO: 450 - protein, 10 aa, Artificial Sequence
  Description of Artificial Sequence: Synthetic peptide
  MOD_RES (4)..(4): phosphoserine
  MOD_RES (8)..(8): oxidized methionine
KMDSFLDMQL

SEQ ID NO: 451 - protein, 9 aa, Artificial Sequence
  Description of Artificial Sequence: Synthetic peptide
  MOD_RES (2)..(2): oxidized methionine
  MOD_RES (3)..(3): phosphoserine
KMSSYAFFV

SEQ ID NO: 452 - protein, 9 aa, Artificial Sequence
  Description of Artificial Sequence: Synthetic peptide
  MOD_RES (2)..(2): oxidized methionine
  MOD_RES (4)..(4): phosphoserine
KMSSYAFFV

SEQ ID NO: 453 - protein, 9 aa, Artificial Sequence
  Description of Artificial Sequence: Synthetic peptide
  MOD_RES (3)..(3): phosphoserine
KMSSYAFFV

SEQ ID NO: 454 - protein, 9 aa, Artificial Sequence
  Description of Artificial Sequence: Synthetic peptide
  MOD_RES (4)..(4): phosphoserine
KMSSYAFFV

SEQ ID NO: 455 - protein, 11 aa, Artificial Sequence
  Description of Artificial Sequence: Synthetic peptide
  MOD_RES (2)..(2): oxidized methionine
  MOD_RES (3)..(3): phosphoserine
KMSSYAFFVQT

SEQ ID NO: 456 - protein, 11 aa, Artificial Sequence
  Description of Artificial Sequence: Synthetic peptide
  MOD_RES (2)..(2): oxidized methionine
  MOD_RES (4)..(4): phosphoserine
KMSSYAFFVQT

SEQ ID NO: 457 - protein, 11 aa, Artificial Sequence
  Description of Artificial Sequence: Synthetic peptide
  MOD_RES (3)..(3): phosphoserine
KMSSYAFFVQT

SEQ ID NO: 458 - protein, 11 aa, Artificial Sequence
  Description of Artificial Sequence: Synthetic peptide
  MOD_RES (4)..(4): phosphoserine
KMSSYAFFVQT

SEQ ID NO: 459 - protein, 11 aa, Artificial Sequence
  Description of Artificial Sequence: Synthetic peptide
  MOD_RES (4)..(4): phosphoserine
KPASPARRLDL

SEQ ID NO: 460 - protein, 10 aa, Artificial Sequence
  Description of Artificial Sequence: Synthetic peptide
  MOD_RES (9)..(9): phosphoserine
KPDKTLRFSL

SEQ ID NO: 461 - protein, 11 aa, Artificial Sequence
  Description of Artificial Sequence: Synthetic peptide
  MOD_RES (4)..(4): phosphoserine
KPHSPVTGLYL

SEQ ID NO: 462 - protein, 9 aa, Artificial Sequence
  Description of Artificial Sequence: Synthetic peptide
  MOD_RES (4)..(4): phosphoserine
KPLSRVTSL

SEQ ID NO: 463 - protein, 9 aa, Artificial Sequence
  Description of Artificial Sequence: Synthetic peptide
  MOD_RES (4)..(4): phosphoserine
KPPSPGTVL

SEQ ID NO: 464 - protein, 9 aa, Artificial Sequence
  Description of Artificial Sequence: Synthetic peptide
  MOD_RES (7)..(7): phosphothreonine
KPPSPGTVL

SEQ ID NO: 465 - protein, 9 aa, Artificial Sequence
  Description of Artificial Sequence: Synthetic peptide
  MOD_RES (6)..(6): phosphoserine
  MOD_RES (7)..(7): oxidized methionine
KPRPLSMDL

SEQ ID NO: 466 - protein, 10 aa, Artificial Sequence
  Description of Artificial Sequence: Synthetic peptide
  MOD_RES (6)..(6): phosphoserine
KPRSISFPSA

SEQ ID NO: 467 - protein, 10 aa, Artificial Sequence
  Description of Artificial Sequence: Synthetic peptide
  MOD_RES (9)..(9): phosphothreonine
KPSSLRRVTI

SEQ ID NO: 468 - protein, 11 aa, Artificial Sequence
  Description of Artificial Sequence: Synthetic peptide
  MOD_RES (4)..(4): phosphoserine
KPSSPRGSLLL

SEQ ID NO: 469 - protein, 10 aa, Artificial Sequence
  Description of Artificial Sequence: Synthetic peptide
  MOD_RES (4)..(4): phosphoserine
KQKSLTNLSF

SEQ ID NO: 470 - protein, 10 aa, Artificial Sequence
  Description of Artificial Sequence: Synthetic peptide
  MOD_RES (6)..(6): phosphothreonine
KQKSLTNLSF

SEQ ID NO: 471 - protein, 9 aa, Artificial Sequence
  Description of Artificial Sequence: Synthetic peptide
  MOD_RES (4)..(4): phosphoserine
KRASALLNL

SEQ ID NO: 472 - protein, 9 aa, Artificial Sequence
  Description of Artificial Sequence: Synthetic peptide
  MOD_RES (4)..(4): phosphoserine
KRASYELEF

SEQ ID NO: 473 - protein, 10 aa, Artificial Sequence
  Description of Artificial Sequence: Synthetic peptide
  MOD_RES (4)..(4): phosphoserine
KRDSFIGTPY

SEQ ID NO: 474 - protein, 9 aa, Artificial Sequence
  Description of Artificial Sequence: Synthetic peptide
  MOD_RES (4)..(4): phosphoserine
KRFSLDFNL

SEQ ID NO: 475 - protein, 9 aa, Artificial Sequence
  Description of Artificial Sequence: Synthetic peptide
  MOD_RES (4)..(4): phosphoserine
KRISIFLSM

SEQ ID NO: 476 - protein, 12 aa, Artificial Sequence
  Description of Artificial Sequence: Synthetic peptide
  MOD_RES (4)..(4): phosphoserine
KRISISTSGGSF

SEQ ID NO: 477 - protein, 10 aa, Artificial Sequence
  Description of Artificial Sequence: Synthetic peptide
  MOD_RES (5)..(5): phosphoserine
KRLGSLVDEF

SEQ ID NO: 478 - protein, 11 aa, Artificial Sequence
  Description of Artificial Sequence: Synthetic peptide
  MOD_RES (4)..(4): phosphoserine
KRLSVELTSSL

SEQ ID NO: 479 - protein, 12 aa, Artificial Sequence
  Description of Artificial Sequence: Synthetic peptide
  MOD_RES (4)..(4): phosphoserine
KRLSVELTSSLF

SEQ ID NO: 480 - protein, 11 aa, Artificial Sequence
  Description of Artificial Sequence: Synthetic peptide
  MOD_RES (4)..(4): phosphoserine
KRLSVERIYQK

SEQ ID NO: 481 - protein, 9 aa, Artificial Sequence
  Description of Artificial Sequence: Synthetic peptide
  MOD_RES (4)..(4): phosphoserine
KRMSFVMEY

SEQ ID NO: 482 - protein, 9 aa, Artificial Sequence
  Description of Artificial Sequence: Synthetic peptide
  MOD_RES (4)..(4): phosphoserine
KRNSDLLLL

SEQ ID NO: 483 - protein, 10 aa, Artificial Sequence
  Description of Artificial Sequence: Synthetic peptide
  MOD_RES (4)..(4): phosphoserine
KRPSSEDFVF

SEQ ID NO: 484 - protein, 11 aa, Artificial Sequence
  Description of Artificial Sequence: Synthetic peptide
  MOD_RES (4)..(4): phosphoserine
KRPSSEDFVFL

SEQ ID NO: 485 - protein, 11 aa, Artificial Sequence
  Description of Artificial Sequence: Synthetic peptide
  MOD_RES (5)..(5): phosphoserine
KRPSSEDFVFL

SEQ ID NO: 486 - protein, 9 aa, Artificial Sequence
  Description of Artificial Sequence: Synthetic peptide
  MOD_RES (4)..(4): phosphothreonine
KRRTGALVL

SEQ ID NO: 487 - protein, 9 aa, Artificial Sequence
  Description of Artificial Sequence: Synthetic peptide
  MOD_RES (4)..(4): phosphoserine
KRSSISQLL

SEQ ID NO: 488 - protein, 9 aa, Artificial Sequence
  Description of Artificial Sequence: Synthetic peptide
  MOD_RES (4)..(4): phosphoserine
KRVSTFQEF

SEQ ID NO: 489 - protein, 9 aa, Artificial Sequence
  Description of Artificial Sequence: Synthetic peptide
  MOD_RES (4)..(4): phosphothreonine
KRVTWIVEF

SEQ ID NO: 490 - protein, 8 aa, Artificial Sequence
  Description of Artificial Sequence: Synthetic peptide
  MOD_RES (7)..(7): phosphoserine
KRYLFRSF

SEQ ID NO: 491 - protein, 9 aa, Artificial Sequence
  Description of Artificial Sequence: Synthetic peptide
  MOD_RES (4)..(4): phosphoserine
KRYSRSLTI

SEQ ID NO: 492 - protein, 9 aa, Artificial Sequence
  Description of Artificial Sequence: Synthetic peptide
  MOD_RES (4)..(4): phosphoserine
KSASFAFEF

SEQ ID NO: 493 - protein, 9 aa, Artificial Sequence
  Description of Artificial Sequence: Synthetic peptide
  MOD_RES (5)..(5): phosphoserine
KSDGSFIGY

SEQ ID NO: 494 - protein, 11 aa, Artificial Sequence
  Description of Artificial Sequence: Synthetic peptide
  MOD_RES (4)..(4): phosphoserine
KSFSAPATQAY

SEQ ID NO: 495 - protein, 9 aa, Artificial Sequence
  Description of Artificial Sequence: Synthetic peptide
  MOD_RES (8)..(8): phosphothreonine
  MOD_RES (9)..(9): oxidized tryptophan
KSGELLATW

SEQ ID NO: 496 - protein, 9 aa, Artificial Sequence
  Description of Artificial Sequence: Synthetic peptide
  MOD_RES (8)..(8): phosphothreonine
KSGEPLSTW

SEQ ID NO: 497 - protein, 9 aa, Artificial Sequence
  Description of Artificial Sequence: Synthetic peptide
  MOD_RES (4)..(4): phosphoserine
KSKSIEITF

SEQ ID NO: 498 - protein, 10 aa, Artificial Sequence
  Description of Artificial Sequence: Synthetic peptide
  MOD_RES (2)..(2): phosphoserine
  MOD_RES (9)..(9): oxidized methionine
KSLPSDQVML

SEQ ID NO: 499 - protein, 10 aa, Artificial Sequence
  Description of Artificial Sequence: Synthetic peptide
  MOD_RES (2)..(2): phosphoserine
KSLPSDQVML

SEQ ID NO: 500 - protein, 11 aa, Artificial Sequence
  Description of Artificial Sequence: Synthetic peptide
  MOD_RES (4)..(4): phosphoserine
KSLSIEIGHEV

SEQ ID NO: 501 - protein, 10 aa, Artificial Sequence
  Description of Artificial Sequence: Synthetic peptide
  MOD_RES (6)..(6): phosphoserine
KSLSPSLLGY

SEQ ID NO: 502 - protein, 13 aa, Artificial Sequence
  Description of Artificial Sequence: Synthetic peptide
  MOD_RES (11)..(11): phosphoserine
KSSEEKRLSISKF

SEQ ID NO: 503 - protein, 9 aa, Artificial Sequence
  Description of Artificial Sequence: Synthetic peptide
  MOD_RES (4)..(4): phosphoserine
KSSSLPRAF

SEQ ID NO: 504 - protein, 10 aa, Artificial Sequence
  Description of Artificial Sequence: Synthetic peptide
  MOD_RES (4)..(4): phosphothreonine
KSVTPTKEFL

SEQ ID NO: 505 - protein, 11 aa, Artificial Sequence
  Description of Artificial Sequence: Synthetic peptide
  MOD_RES (4)..(4): phosphoserine
KTDSDSDLQLY

SEQ ID NO: 506 - protein, 12 aa, Artificial Sequence
  Description of Artificial Sequence: Synthetic peptide
  MOD_RES (4)..(4): phosphoserine
KTISESDLNHSF

SEQ ID NO: 507 - protein, 10 aa, Artificial Sequence
  Description of Artificial Sequence: Synthetic peptide
  MOD_RES (4)..(4): phosphoserine
KTISPKSTVY

SEQ ID NO: 508 - protein, 9 aa, Artificial Sequence
  Description of Artificial Sequence: Synthetic peptide
  MOD_RES (4)..(4): phosphoserine
KTKSMFFFL

SEQ ID NO: 509 - protein, 9 aa, Artificial Sequence
  Description of Artificial Sequence: Synthetic peptide
  MOD_RES (4)..(4): phosphoserine
KTLSLVKEL

SEQ ID NO: 510 - protein, 9 aa, Artificial Sequence
  Description of Artificial Sequence: Synthetic peptide
  MOD_RES (3)..(3): oxidized methionine
  MOD_RES (4)..(4): phosphoserine
KTMSGTFLL

SEQ ID NO: 511 - protein, 9 aa, Artificial Sequence
  Description of Artificial Sequence: Synthetic peptide
  MOD_RES (3)..(3): oxidized methionine
  MOD_RES (6)..(6): phosphothreonine
KTMSGTFLL

SEQ ID NO: 512 - protein, 9 aa, Artificial Sequence
  Description of Artificial Sequence: Synthetic peptide
  MOD_RES (6)..(6): phosphothreonine
KTMSGTFLL

SEQ ID NO: 513 - protein, 11 aa, Artificial Sequence
  Description of Artificial Sequence: Synthetic peptide
  MOD_RES (3)..(3): oxidized methionine
  MOD_RES (4)..(4): phosphoserine
KTMSGTFLLRF

SEQ ID NO: 514 - protein, 11 aa, Artificial Sequence
  Description of Artificial Sequence: Synthetic peptide
  MOD_RES (4)..(4): phosphoserine
KTMSGTFLLRF

SEQ ID NO: 515 - protein, 10 aa, Artificial Sequence
  Description of Artificial Sequence: Synthetic peptide
  MOD_RES (2)..(2): phosphothreonine
KTMSPSQMIM

SEQ ID NO: 516 - protein, 9 aa, Artificial Sequence
  Description of Artificial Sequence: Synthetic peptide
  MOD_RES (6)..(6): phosphoserine
KTQRVSLLF

SEQ ID NO: 517 - protein, 11 aa, Artificial Sequence
  Description of Artificial Sequence: Synthetic peptide
  MOD_RES (2)..(2): phosphothreonine
KTRSLSVEIVY

SEQ ID NO: 518 - protein, 11 aa, Artificial Sequence
  Description of Artificial Sequence: Synthetic peptide
  MOD_RES (4)..(4): phosphoserine
KTRSLSVEIVY

SEQ ID NO: 519 - protein, 11 aa, Artificial Sequence
  Description of Artificial Sequence: Synthetic peptide
  MOD_RES (4)..(4): phosphoserine
KTVSPPIRKGW

SEQ ID NO: 520 - protein, 11 aa, Artificial Sequence
  Description of Artificial Sequence: Synthetic peptide
  MOD_RES (4)..(4): phosphoserine
KTVSSTKLVSF

SEQ ID NO: 521 - protein, 10 aa, Artificial Sequence
  Description of Artificial Sequence: Synthetic peptide
  MOD_RES (9)..(9): phosphoserine
KVDGPRSPSY

SEQ ID NO: 522 - protein, 10 aa, Artificial Sequence
  Description of Artificial Sequence: Synthetic peptide
  MOD_RES (4)..(4): phosphoserine
  MOD_RES (10)..(10): oxidized tryptophan
KVESPPLEEW

SEQ ID NO: 523 - protein, 9 aa, Artificial Sequence
  Description of Artificial Sequence: Synthetic peptide
  MOD_RES (4)..(4): phosphoserine
KVFSLPTQL

SEQ ID NO: 524 - protein, 11 aa, Artificial Sequence
  Description of Artificial Sequence: Synthetic peptide
  MOD_RES (4)..(4): phosphoserine
KVFSPVIRSSF

SEQ ID NO: 525 - protein, 10 aa, Artificial Sequence
  Description of Artificial Sequence: Synthetic peptide
  MOD_RES (4)..(4): phosphoserine
KVGSFKFIYV

SEQ ID NO: 526 - protein, 9 aa, Artificial Sequence
  Description of Artificial Sequence: Synthetic peptide
  MOD_RES (4)..(4): phosphoserine
  MOD_RES (5)..(5): oxidized tryptophan
  MOD_RES (9)..(9): oxidized methionine
KVLSWPFLM

SEQ ID NO: 527 - protein, 9 aa, Artificial Sequence
  Description of Artificial Sequence: Synthetic peptide
  MOD_RES (4)..(4): phosphoserine
  MOD_RES (5)..(5): oxidized tryptophan
KVLSWPFLM

SEQ ID NO: 528 - protein, 10 aa, Artificial Sequence
  Description of Artificial Sequence: Synthetic peptide
  MOD_RES (4)..(4): phosphoserine
KWPSKRRIPV

SEQ ID NO: 529 - protein, 10 aa, Artificial Sequence
  Description of Artificial Sequence: Synthetic peptide
  MOD_RES (4)..(4): phosphoserine
KYRSVISDIF

SEQ ID NO: 530 - protein, 11 aa, Artificial Sequence
  Description of Artificial Sequence: Synthetic peptide
  MOD_RES (5)..(5): phosphoserine
LAFPSPEKLLR

SEQ ID NO: 531 - protein, 10 aa, Artificial Sequence
  Description of Artificial Sequence: Synthetic peptide
  MOD_RES (3)..(3): phosphoserine
LASDRCSIHL

SEQ ID NO: 532 - protein, 10 aa, Artificial Sequence
  Description of Artificial Sequence: Synthetic peptide
  MOD_RES (6)..(6): phosphoserine
LEIKESILSL

SEQ ID NO: 533 - protein, 9 aa, Artificial Sequence
  Description of Artificial Sequence: Synthetic peptide
  MOD_RES (4)..(4): phosphoserine
LEISPDNSL

SEQ ID NO: 534 - protein, 9 aa, Artificial Sequence
  Description of Artificial Sequence: Synthetic peptide
  MOD_RES (4)..(4): phosphoserine
LEISVGKSV

SEQ ID NO: 535 - protein, 9 aa, Artificial Sequence
  Description of Artificial Sequence: Synthetic peptide
  MOD_RES (3)..(3): phosphoserine
LESPTTPLL

SEQ ID NO: 536 - protein, 9 aa, Artificial Sequence
  Description of Artificial Sequence: Synthetic peptide
  MOD_RES (5)..(5): phosphothreonine
LESPTTPLL

SEQ ID NO: 537 - protein, 9 aa, Artificial Sequence
  Description of Artificial Sequence: Synthetic peptide
  MOD_RES (6)..(6): phosphothreonine
LESPTTPLL

SEQ ID NO: 538 - protein, 10 aa, Artificial Sequence
  Description of Artificial Sequence: Synthetic peptide
  MOD_RES (7)..(7): phosphoserine
  MOD_RES (9)..(9): oxidized methionine
LGFEVKSKMV

SEQ ID NO: 539 - protein, 10 aa, Artificial Sequence
  Description of Artificial Sequence: Synthetic peptide
  MOD_RES (7)..(7): phosphoserine
LGFEVKSKMV

SEQ ID NO: 540 - protein, 9 aa, Artificial Sequence
  Description of Artificial Sequence: Synthetic peptide
  MOD_RES (3)..(3): oxidized methionine
  MOD_RES (7)..(7): phosphoserine
LGMEVLSGV

SEQ ID NO: 541 - protein, 9 aa, Artificial Sequence
  Description of Artificial Sequence: Synthetic peptide
  MOD_RES (7)..(7): phosphoserine
LGMEVLSGV

SEQ ID NO: 542 - protein, 9 aa, Artificial Sequence
  Description of Artificial Sequence: Synthetic peptide
  MOD_RES (6)..(6): phosphothreonine
LIPDHTIRA

SEQ ID NO: 543 - protein, 8 aa, Artificial Sequence
  Description of Artificial Sequence: Synthetic peptide
  MOD_RES (7)..(7): phosphoserine
LLDIIRSL

SEQ ID NO: 544 - protein, 10 aa, Artificial Sequence
  Description of Artificial Sequence: Synthetic peptide
  MOD_RES (9)..(9): phosphothreonine
LLDPRSYHTY

SEQ ID NO: 545 - protein, 8 aa, Artificial Sequence
  Description of Artificial Sequence: Synthetic peptide
  MOD_RES (3)..(3): phosphoserine
LLSPKHKY

SEQ ID NO: 546 - protein, 11 aa, Artificial Sequence
  Description of Artificial Sequence: Synthetic peptide
  MOD_RES (4)..(4): phosphoserine
LPASPRARLSA

SEQ ID NO: 547 - protein, 9 aa, Artificial Sequence
  Description of Artificial Sequence: Synthetic peptide
  MOD_RES (4)..(4): phosphoserine
LPASPSVSL

SEQ ID NO: 548 - protein, 9 aa, Artificial Sequence
  Description of Artificial Sequence: Synthetic peptide
  MOD_RES (6)..(6): phosphoserine
LPASPSVSL

SEQ ID NO: 549 - protein, 9 aa, Artificial Sequence
  Description of Artificial Sequence: Synthetic peptide
  MOD_RES (6)..(6): phosphoserine
LPDPGSPRL

SEQ ID NO: 550 - protein, 9 aa, Artificial Sequence
  Description of Artificial Sequence: Synthetic peptide
  MOD_RES (4)..(4): phosphoserine
LPESPRLTL

SEQ ID NO: 551 - protein, 11 aa, Artificial Sequence
  Description of Artificial Sequence: Synthetic peptide
  MOD_RES (10)..(10): phosphoserine
LPFSGPREPSL

SEQ ID NO: 552 - protein, 11 aa, Artificial Sequence
  Description of Artificial Sequence: Synthetic peptide
  MOD_RES (5)..(5): phosphoserine
LPFSSSPSRSA

SEQ ID NO: 553 - protein, 11 aa, Artificial Sequence
  Description of Artificial Sequence: Synthetic peptide
  MOD_RES (6)..(6): phosphoserine
LPFSSSPSRSA

SEQ ID NO: 554 - protein, 11 aa, Artificial Sequence
  Description of Artificial Sequence: Synthetic peptide
  MOD_RES (4)..(4): phosphoserine
LPLSSSHLNVY

SEQ ID NO: 555 - protein, 11 aa, Artificial Sequence
  Description of Artificial Sequence: Synthetic peptide
  MOD_RES (5)..(5): phosphoserine
LPLSSSHLNVY

SEQ ID NO: 556 - protein, 11 aa, Artificial Sequence
  Description of Artificial Sequence: Synthetic peptide
  MOD_RES (6)..(6): phosphoserine
LPLSSSHLNVY

SEQ ID NO: 557 - protein, 10 aa, Artificial Sequence
  Description of Artificial Sequence: Synthetic peptide
  MOD_RES (5)..(5): phosphoserine
LPPVSPLKAA

SEQ ID NO: 558 - protein, 11 aa, Artificial Sequence
  Description of Artificial Sequence: Synthetic peptide
  MOD_RES (6)..(6): phosphoserine
LPRGLSPARQL

SEQ ID NO: 559 - protein, 10 aa, Artificial Sequence
  Description of Artificial Sequence: Synthetic peptide
  MOD_RES (8)..(8): phosphoserine
LPRGSSPSVL

SEQ ID NO: 560 - protein, 10 aa, Artificial Sequence
  Description of Artificial Sequence: Synthetic peptide
  MOD_RES (6)..(6): phosphoserine
LPRPLSPTKL

SEQ ID NO: 561 - protein, 10 aa, Artificial Sequence
  Description of Artificial Sequence: Synthetic peptide
  MOD_RES (8)..(8): phosphothreonine
LPRPLSPTKL

SEQ ID NO: 562 - protein, 11 aa, Artificial Sequence
  Description of Artificial Sequence: Synthetic peptide
  MOD_RES (6)..(6): phosphoserine
LPRRLSDSPVF

SEQ ID NO: 563 - protein, 11 aa, Artificial Sequence
  Description of Artificial Sequence: Synthetic peptide
  MOD_RES (8)..(8): phosphoserine
LPRRLSDSPVF

SEQ ID NO: 564 - protein, 10 aa, Artificial Sequence
  Description of Artificial Sequence: Synthetic peptide
  MOD_RES (4)..(4): phosphoserine
LPRSPPLKVL

SEQ ID NO: 565 - protein, 9 aa, Artificial Sequence
  Description of Artificial Sequence: Synthetic peptide
  MOD_RES (4)..(4): phosphoserine
LPRSSRGLL

SEQ ID NO: 566 - protein, 9 aa, Artificial Sequence
  Description of Artificial Sequence: Synthetic peptide
  MOD_RES (5)..(5): phosphoserine
LPRSSRGLL

SEQ ID NO: 567 - protein, 11 aa, Artificial Sequence
  Description of Artificial Sequence: Synthetic peptide
  MOD_RES (6)..(6): phosphoserine
  MOD_RES (7)..(7): oxidized methionine
LPRSSSMAAGL

SEQ ID NO: 568 - protein, 9 aa, Artificial Sequence
  Description of Artificial Sequence: Synthetic peptide
  MOD_RES (8)..(8): phosphoserine
LPSARPLSL

SEQ ID NO: 569 - protein, 8 aa, Artificial Sequence
  Description of Artificial Sequence: Synthetic peptide
  MOD_RES (3)..(3): phosphoserine
  MOD_RES (8)..(8): cysteinylated cysteine
LPSRLTKC

SEQ ID NO: 570 - protein, 8 aa, Artificial Sequence
  Description of Artificial Sequence: Synthetic peptide
  MOD_RES (4)..(4): phosphoserine
  MOD_RES (8)..(8): oxidized methionine
LPTSPLAM

SEQ ID NO: 571 - protein, 10 aa, Artificial Sequence
  Description of Artificial Sequence: Synthetic peptide
  MOD_RES (3)..(3): phosphothreonine
  MOD_RES (8)..(8): oxidized methionine
LPTSPLAMEY

SEQ ID NO: 572 - protein, 10 aa, Artificial Sequence
  Description of Artificial Sequence: Synthetic peptide
  MOD_RES (3)..(3): phosphothreonine
LPTSPLAMEY

SEQ ID NO: 573 - protein, 10 aa, Artificial Sequence
  Description of Artificial Sequence: Synthetic peptide
  MOD_RES (4)..(4): phosphoserine
  MOD_RES (8)..(8): oxidized methionine
LPTSPLAMEY

SEQ ID NO: 574 - protein, 10 aa, Artificial Sequence
  Description of Artificial Sequence: Synthetic peptide
  MOD_RES (4)..(4): phosphoserine
LPTSPLAMEY

SEQ ID NO: 575 - protein, 10 aa, Artificial Sequence
  Description of Artificial Sequence: Synthetic peptide
  MOD_RES (4)..(4): phosphoserine
LPVSPGHRKT

SEQ ID NO: 576 - protein, 11 aa, Artificial Sequence
  Description of Artificial Sequence: Synthetic peptide
  MOD_RES (6)..(6): phosphoserine
LPYPVSPKQKY

SEQ ID NO: 577 - protein, 10 aa, Artificial Sequence
  Description of Artificial Sequence: Synthetic peptide
  MOD_RES (6)..(6): phosphoserine
LQHSFSFAGF

SEQ ID NO: 578 - protein, 9 aa, Artificial Sequence
  Description of Artificial Sequence: Synthetic peptide
  MOD_RES (4)..(4): phosphoserine
LQISPVSSY

SEQ ID NO: 579 - protein, 9 aa, Artificial Sequence
  Description of Artificial Sequence: Synthetic peptide
  MOD_RES (4)..(4): phosphoserine
  MOD_RES (9)..(9): oxidized tryptophan
LSKSSATLW

SEQ ID NO: 580 - protein, 9 aa, Artificial Sequence
  Description of Artificial Sequence: Synthetic peptide
  MOD_RES (4)..(4): phosphothreonine
LSPTKLPSI

SEQ ID NO: 581 - protein, 9 aa, Artificial Sequence
  Description of Artificial Sequence: Synthetic peptide
  MOD_RES (7)..(7): phosphoserine
LSRTFKSLF

SEQ ID NO: 582 - protein, 9 aa, Artificial Sequence
  Description of Artificial Sequence: Synthetic peptide
  MOD_RES (2)..(2): phosphoserine
LSSSVIREL

SEQ ID NO: 583 - protein, 9 aa, Artificial Sequence
  Description of Artificial Sequence: Synthetic peptide
  MOD_RES (3)..(3): phosphoserine
LSSSVIREL

SEQ ID NO: 584 - protein, 9 aa, Artificial Sequence
  Description of Artificial Sequence: Synthetic peptide
  MOD_RES (4)..(4): phosphoserine
LTASQILSR

SEQ ID NO: 585 - protein, 12 aa, Artificial Sequence
  Description of Artificial Sequence: Synthetic peptide
  MOD_RES (5)..(5): phosphoserine
LTDPSSPTISSY

SEQ ID NO: 586 - protein, 12 aa, Artificial Sequence
  Description of Artificial Sequence: Synthetic peptide
  MOD_RES (8)..(8): phosphothreonine
LTDPSSPTISSY

SEQ ID NO: 587 - protein, 8 aa, Artificial Sequence
  Description of Artificial Sequence: Synthetic peptide
  MOD_RES (4)..(4): phosphothreonine
LTKTLIKL

SEQ ID NO: 588 - protein, 9 aa, Artificial Sequence
  Description of Artificial Sequence: Synthetic peptide
  MOD_RES (4)..(4): phosphoserine
LVASPRLEK

SEQ ID NO: 589 - protein, 11 aa, Artificial Sequence
  Description of Artificial Sequence: Synthetic peptide
  MOD_RES (7)..(7): phosphoserine
  MOD_RES (10)..(10): cysteinylated cysteine
LVREPGSQACL

SEQ ID NO: 590 - protein, 11 aa, Artificial Sequence
  Description of Artificial Sequence: Synthetic peptide
  MOD_RES (1)..(1): oxidized methionine
  MOD_RES (4)..(4): phosphoserine
MIISPERLDPF

SEQ ID NO: 591 - protein, 11 aa, Artificial Sequence
  Description of Artificial Sequence: Synthetic peptide
  MOD_RES (4)..(4): phosphoserine
MIISPERLDPF

SEQ ID NO: 592 - protein, 9 aa, Artificial Sequence
  Description of Artificial Sequence: Synthetic peptide
  MOD_RES (4)..(4): phosphoserine
MLPSPNEKL

SEQ ID NO: 593 - protein, 9 aa, Artificial Sequence
  Description of Artificial Sequence: Synthetic peptide
  MOD_RES (8)..(8): phosphothreonine
MPFPAHLTY

SEQ ID NO: 594 - protein, 9 aa, Artificial Sequence
  Description of Artificial Sequence: Synthetic peptide
  MOD_RES (1)..(1): oxidized methionine
  MOD_RES (4)..(4): phosphoserine
MPHSPTLRV

SEQ ID NO: 595 - protein, 9 aa, Artificial Sequence
  Description of Artificial Sequence: Synthetic peptide
  MOD_RES (1)..(1): oxidized methionine
  MOD_RES (6)..(6): phosphothreonine
MPHSPTLRV

SEQ ID NO: 596 - protein, 9 aa, Artificial Sequence
  Description of Artificial Sequence: Synthetic peptide
  MOD_RES (4)..(4): phosphoserine
MPHSPTLRV

SEQ ID NO: 597 - protein, 9 aa, Artificial Sequence
  Description of Artificial Sequence: Synthetic peptide
  MOD_RES (6)..(6): phosphothreonine
MPHSPTLRV

SEQ ID NO: 598 - protein, 9 aa, Artificial Sequence
  Description of Artificial Sequence: Synthetic peptide
  MOD_RES (8)..(8): phosphoserine
MPKFRMPSL

SEQ ID NO: 599 - protein, 9 aa, Artificial Sequence
  Description of Artificial Sequence: Synthetic peptide
  MOD_RES (7)..(7): phosphoserine
MPQDLRSPA

SEQ ID NO: 600 - protein, 10 aa, Artificial Sequence
  Description of Artificial Sequence: Synthetic peptide
  MOD_RES (1)..(1): oxidized methionine
  MOD_RES (6)..(6): phosphoserine
MPREPSATRL

SEQ ID NO: 601 - protein, 10 aa, Artificial Sequence
  Description of Artificial Sequence: Synthetic peptide
  MOD_RES (1)..(1): oxidized methionine
  MOD_RES (6)..(6): phosphoserine
MPRQPSATRL

SEQ ID NO: 602 - protein, 11 aa, Artificial Sequence
  Description of Artificial Sequence: Synthetic peptide
  MOD_RES (1)..(1): oxidized methionine
  MOD_RES (3)..(3): phosphoserine
MPSPATLSHSL

SEQ ID NO: 603 - protein, 11 aa, Artificial Sequence
  Description of Artificial Sequence: Synthetic peptide
  MOD_RES (3)..(3): phosphoserine
MPSPATLSHSL

SEQ ID NO: 604 - protein, 10 aa, Artificial Sequence
  Description of Artificial Sequence: Synthetic peptide
  MOD_RES (3)..(3): phosphoserine
MPSPFRSSAL

SEQ ID NO: 605 - protein, 10 aa, Artificial Sequence
  Description of Artificial Sequence: Synthetic peptide
  MOD_RES (1)..(1): oxidized methionine
  MOD_RES (3)..(3): phosphoserine
MPSPGGRITL

SEQ ID NO: 606 - protein, 10 aa, Artificial Sequence
  Description of Artificial Sequence: Synthetic peptide
  MOD_RES (3)..(3): phosphoserine
MPSPGGRITL

SEQ ID NO: 607 - protein, 11 aa, Artificial Sequence
  Description of Artificial Sequence: Synthetic peptide
  MOD_RES (3)..(3): phosphoserine
MPSPIMHPLIL

SEQ ID NO: 608 - protein, 11 aa, Artificial Sequence
  Description of Artificial Sequence: Synthetic peptide
  MOD_RES (3)..(3): phosphoserine
MPSPLKGQHTL

SEQ ID NO: 609 - protein, 11 aa, Artificial Sequence
  Description of Artificial Sequence: Synthetic peptide
  MOD_RES (3)..(3): phosphoserine
MPSPSTLKKEL

SEQ ID NO: 610 - protein, 9 aa, Artificial Sequence
  Description of Artificial Sequence: Synthetic peptide
  MOD_RES (1)..(1): oxidized methionine
  MOD_RES (3)..(3): phosphoserine
MPSPVSPKL

SEQ ID NO: 611 - protein, 9 aa, Artificial Sequence
  Description of Artificial Sequence: Synthetic peptide
  MOD_RES (1)..(1): oxidized methionine
  MOD_RES (6)..(6): phosphoserine
MPSPVSPKL

SEQ ID NO: 612 - protein, 9 aa, Artificial Sequence
  Description of Artificial Sequence: Synthetic peptide
  MOD_RES (3)..(3): phosphoserine
MPSPVSPKL

SEQ ID NO: 613 - protein, 9 aa, Artificial Sequence
  Description of Artificial Sequence: Synthetic peptide
  MOD_RES (6)..(6): phosphoserine
MPSPVSPKL

SEQ ID NO: 614 - protein, 9 aa, Artificial Sequence
  Description of Artificial Sequence: Synthetic peptide
  MOD_RES (3)..(3): phosphothreonine
MPTSPGVDL

SEQ ID NO: 615 - protein, 9 aa, Artificial Sequence
  Description of Artificial Sequence: Synthetic peptide
  MOD_RES (4)..(4): phosphoserine
MPTSPGVDL

SEQ ID NO: 616 - protein, 9 aa, Artificial Sequence
  Description of Artificial Sequence: Synthetic peptide
  MOD_RES (1)..(1): oxidized methionine
  MOD_RES (4)..(4): phosphoserine
MRLSRELQL

SEQ ID NO: 617 - protein, 8 aa, Artificial Sequence
  Description of Artificial Sequence: Synthetic peptide
  MOD_RES (8)..(8): phosphothreonine
MSKLINHT

SEQ ID NO: 618 - protein, 9 aa, Artificial Sequence
  Description of Artificial Sequence: Synthetic peptide
  MOD_RES (1)..(1): oxidized methionine
  MOD_RES (5)..(5): phosphoserine
MTKSSPLKI

SEQ ID NO: 619 - protein, 8 aa, Artificial Sequence
  Description of Artificial Sequence: Synthetic peptide
  MOD_RES (4)..(4): phosphoserine
NAISLPTI

SEQ ID NO: 620 - protein, 11 aa, Artificial Sequence
  Description of Artificial Sequence: Synthetic peptide
  MOD_RES (4)..(4): phosphoserine
NAVSPSSGPSL

SEQ ID NO: 621 - protein, 10 aa, Artificial Sequence
  Description of Artificial Sequence: Synthetic peptide
  MOD_RES (4)..(4): phosphoserine
NAWSPVMRAR

SEQ ID NO: 622 - protein, 10 aa, Artificial Sequence
  Description of Artificial Sequence: Synthetic peptide
  MOD_RES (4)..(4): phosphothreonine
NHVTPPNVSL

SEQ ID NO: 623 - protein, 9 aa, Artificial Sequence
  Description of Artificial Sequence: Synthetic peptide
  MOD_RES (4)..(4): phosphoserine
NIPSFIVRL

SEQ ID NO: 624 - protein, 12 aa, Artificial Sequence
  Description of Artificial Sequence: Synthetic peptide
  MOD_RES (4)..(4): phosphoserine
  MOD_RES (9)..(9): oxidized methionine
NLLSPDGKMISV

SEQ ID NO: 625 - protein, 9 aa, Artificial Sequence
  Description of Artificial Sequence: Synthetic peptide
  MOD_RES (2)..(2): oxidized methionine
  MOD_RES (4)..(4): phosphoserine
NMDSPGPML

SEQ ID NO: 626 - protein, 9 aa, Artificial Sequence
  Description of Artificial Sequence: Synthetic peptide
  MOD_RES (4)..(4): phosphoserine
  MOD_RES (8)..(8): oxidized methionine
NMDSPGPML

SEQ ID NO: 627 - protein, 10 aa, Artificial Sequence
  Description of Artificial Sequence: Synthetic peptide
  MOD_RES (5)..(5): phosphoserine
NPIHSPSYPL

SEQ ID NO: 628 - protein, 10 aa, Artificial Sequence
  Description of Artificial Sequence: Synthetic peptide
  MOD_RES (7)..(7): phosphoserine
NPIHSPSYPL

SEQ ID NO: 629 - protein, 9 aa, Artificial Sequence
  Description of Artificial Sequence: Synthetic peptide
  MOD_RES (3)..(3): phosphoserine
  MOD_RES (9)..(9): oxidized methionine
NPSSPEFFM

SEQ ID NO: 630 - protein, 9 aa, Artificial Sequence
  Description of Artificial Sequence: Synthetic peptide
  MOD_RES (3)..(3): phosphoserine
NPSSPEFFM

SEQ ID NO: 631 - protein, 9 aa, Artificial Sequence
  Description of Artificial Sequence: Synthetic peptide
  MOD_RES (4)..(4): phosphoserine
  MOD_RES (9)..(9): oxidized methionine
NPSSPEFFM

SEQ ID NO: 632 - protein, 9 aa, Artificial Sequence
  Description of Artificial Sequence: Synthetic peptide
  MOD_RES (4)..(4): phosphoserine
NPSSPEFFM

SEQ ID NO: 633 - protein, 10 aa, Artificial Sequence
  Description of Artificial Sequence: Synthetic peptide
  MOD_RES (4)..(4): phosphoserine
NQGSPFKSAL

SEQ ID NO: 634 - protein, 9 aa, Artificial Sequence
  Description of Artificial Sequence: Synthetic peptide
  MOD_RES (4)..(4): phosphoserine
NRESFQIFL

SEQ ID NO: 635 - protein, 12 aa, Artificial Sequence
  Description of Artificial Sequence: Synthetic peptide
  MOD_RES (4)..(4): phosphoserine
NRFSGGFGARDY

SEQ ID NO: 636 - protein, 9 aa, Artificial Sequence
  Description of Artificial Sequence: Synthetic peptide
  MOD_RES (4)..(4): phosphoserine
NRFSPKASL

SEQ ID NO: 637 - protein, 9 aa, Artificial Sequence
  Description of Artificial Sequence: Synthetic peptide
  MOD_RES (4)..(4): phosphoserine
NRHSLPFSL

SEQ ID NO: 638 - protein, 9 aa, Artificial Sequence
  Description of Artificial Sequence: Synthetic peptide
  MOD_RES (4)..(4): phosphoserine
NRHSLVEKL

SEQ ID NO: 639 - protein, 9 aa, Artificial Sequence
  Description of Artificial Sequence: Synthetic peptide
  MOD_RES (4)..(4): phosphoserine
NRLSLLVQK

SEQ ID NO: 640 - protein, 9 aa, Artificial Sequence
  Description of Artificial Sequence: Synthetic peptide
  MOD_RES (4)..(4): phosphoserine
NRMSRRIVL

SEQ ID NO: 641 - protein, 16 aa, Artificial Sequence
  Description of Artificial Sequence: Synthetic peptide
  MOD_RES (10)..(10): phosphoserine
NRSLHINNISPGNTIS

SEQ ID NO: 642 - protein, 9 aa, Artificial Sequence
  Description of Artificial Sequence: Synthetic peptide
  MOD_RES (4)..(4): phosphoserine
NRSSPVHII

SEQ ID NO: 643 - protein, 9 aa, Artificial Sequence
  Description of Artificial Sequence: Synthetic peptide
  MOD_RES (8)..(8): phosphoserine
NSISSVVSR

SEQ ID NO: 644 - protein, 9 aa, Artificial Sequence
  Description of Artificial Sequence: Synthetic peptide
  MOD_RES (4)..(4): phosphoserine
NSLSPRSSL

SEQ ID NO: 645 - protein, 9 aa, Artificial Sequence
  Description of Artificial Sequence: Synthetic peptide
  MOD_RES (4)..(4): phosphoserine
NSVSPSESL

SEQ ID NO: 646 - protein, 9 aa, Artificial Sequence
  Description of Artificial Sequence: Synthetic peptide
  MOD_RES (4)..(4): phosphoserine
NVLSPLPSQ

SEQ ID NO: 647 - protein, 11 aa, Artificial Sequence
  Description of Artificial Sequence: Synthetic peptide
  MOD_RES (4)..(4): phosphoserine
NVLSPLPSQAM

SEQ ID NO: 648 - protein, 9 aa, Artificial Sequence
  Description of Artificial Sequence: Synthetic peptide
  MOD_RES (8)..(8): phosphoserine
NVMKRKFSL

SEQ ID NO: 649 - protein, 10 aa, Artificial Sequence
  Description of Artificial Sequence: Synthetic peptide
  MOD_RES (6)..(6): phosphoserine
PEFPLSPPKK

SEQ ID NO: 650 - protein, 9 aa, Artificial Sequence
  Description of Artificial Sequence: Synthetic peptide
  MOD_RES (4)..(4): phosphoserine
PEVSPRPAL

SEQ ID NO: 651 - protein, 8 aa, Artificial Sequence
  Description of Artificial Sequence: Synthetic peptide
  MOD_RES (7)..(7): phosphoserine
PIFSRLSI

SEQ ID NO: 652 - protein, 8 aa, Artificial Sequence
  Description of Artificial Sequence: Synthetic peptide
  MOD_RES (7)..(7): phosphoserine
PVSKPLSL

SEQ ID NO: 653 - protein, 9 aa, Artificial Sequence
  Description of Artificial Sequence: Synthetic peptide
  MOD_RES (4)..(4): phosphoserine
QEASPRPLL

SEQ ID NO: 654 - protein, 9 aa, Artificial Sequence
  Description of Artificial Sequence: Synthetic peptide
  MOD_RES (4)..(4): phosphothreonine
QLMTLENKL

SEQ ID NO: 655 - protein, 11 aa, Artificial Sequence
  Description of Artificial Sequence: Synthetic peptide
  MOD_RES (4)..(4): phosphoserine
QLPSPTATSQL

SEQ ID NO: 656 - protein, 14 aa, Artificial Sequence
  Description of Artificial Sequence: Synthetic peptide
  MOD_RES (9)..(9): phosphoserine
QPRNSLPASPAHQL

SEQ ID NO: 657 - protein, 10 aa, Artificial Sequence
  Description of Artificial Sequence: Synthetic peptide
  MOD_RES (6)..(6): phosphoserine
QPRTPSPLVL

SEQ ID NO: 658 - protein, 9 aa, Artificial Sequence
  Description of Artificial Sequence: Synthetic peptide
  MOD_RES (5)..(5): phosphoserine
QRVPSYDSF

SEQ ID NO: 659 - protein, 12 aa, Artificial Sequence
  Description of Artificial Sequence: Synthetic peptide
  MOD_RES (4)..(4): phosphoserine
QSISFSGLPSGR

SEQ ID NO: 660 - protein, 9 aa, Artificial Sequence
  Description of Artificial Sequence: Synthetic peptide
  MOD_RES (4)..(4): phosphoserine
QSSSWTRVF

SEQ ID NO: 661 - protein, 9 aa, Artificial Sequence
  Description of Artificial Sequence: Synthetic peptide
  MOD_RES (4)..(4): phosphoserine
QTISPLSTY

SEQ ID NO: 662 - protein, 10 aa, Artificial Sequence
  Description of Artificial Sequence: Synthetic peptide
  MOD_RES (6)..(6): phosphothreonine
QTPDFTPTKY

SEQ ID NO: 663 - protein, 9 aa, Artificial Sequence
  Description of Artificial Sequence: Synthetic peptide
  MOD_RES (4)..(4): phosphoserine
QTPSPRLAL

SEQ ID NO: 664 - protein, 10 aa, Artificial Sequence
  Description of Artificial Sequence: Synthetic peptide
  MOD_RES (6)..(6): phosphoserine
QTRRPSYLEW

SEQ ID NO: 665 - protein, 9 aa, Artificial Sequence
  Description of Artificial Sequence: Synthetic peptide
  MOD_RES (4)..(4): phosphoserine
RAASIENVL

SEQ ID NO: 666 - protein, 11 aa, Artificial Sequence
  Description of Artificial Sequence: Synthetic peptide
  MOD_RES (4)..(4): phosphoserine
  MOD_RES (11)..(11): oxidized tryptophan
RAASSPDGFFW

SEQ ID NO: 667 - protein, 11 aa, Artificial Sequence
  Description of Artificial Sequence: Synthetic peptide
  MOD_RES (5)..(5): phosphoserine
  MOD_RES (11)..(11): oxidized tryptophan
RAASSPDGFFW

SEQ ID NO: 668 - protein, 9 aa, Artificial Sequence
  Description of Artificial Sequence: Synthetic peptide
  MOD_RES (4)..(4): phosphothreonine
RAATPLPSL

SEQ ID NO: 669 - protein, 10 aa, Artificial Sequence
  Description of Artificial Sequence: Synthetic peptide
  MOD_RES (4)..(4): phosphothreonine
RAATPTLTTF

SEQ ID NO: 670 - protein, 10 aa, Artificial Sequence
  Description of Artificial Sequence: Synthetic peptide
  MOD_RES (6)..(6): phosphothreonine
RAATPTLTTF

SEQ ID NO: 671 - protein, 9 aa, Artificial Sequence
  Description of Artificial Sequence: Synthetic peptide
  MOD_RES (4)..(4): phosphoserine
RAGSFSRFY

SEQ ID NO: 672 - protein, 11 aa, Artificial Sequence
  Description of Artificial Sequence: Synthetic peptide
  MOD_RES (4)..(4): phosphothreonine
  MOD_RES (11)..(11): oxidized methionine
RAHTPTPGIYM

SEQ ID NO: 673 - protein, 11 aa, Artificial Sequence
  Description of Artificial Sequence: Synthetic peptide
  MOD_RES (4)..(4): phosphothreonine
RAHTPTPGIYM

SEQ ID NO: 674 - protein, 11 aa, Artificial Sequence
  Description of Artificial Sequence: Synthetic peptide
  MOD_RES (6)..(6): phosphothreonine
RAHTPTPGIYM

SEQ ID NO: 675 - protein, 9 aa, Artificial Sequence
  Description of Artificial Sequence: Synthetic peptide
  MOD_RES (4)..(4): phosphoserine
RALSHADLF

SEQ ID NO: 676 - protein, 9 aa, Artificial Sequence
  Description of Artificial Sequence: Synthetic peptide
  MOD_RES (4)..(4): phosphoserine
RALSLTRAL

SEQ ID NO: 677 - protein, 11 aa, Artificial Sequence
  Description of Artificial Sequence: Synthetic peptide
  MOD_RES (4)..(4): phosphoserine
RANSFVGTAQY

SEQ ID NO: 678 - protein, 10 aa, Artificial Sequence
  Description of Artificial Sequence: Synthetic peptide
  MOD_RES (4)..(4): phosphoserine
RAPSYRTLEL

SEQ ID NO: 679 - protein, 10 aa, Artificial Sequence
  Description of Artificial Sequence: Synthetic peptide
  MOD_RES (4)..(4): phosphoserine
RARSPVLWGW

SEQ ID NO: 680 - protein, 10 aa, Artificial Sequence
  Description of Artificial Sequence: Synthetic peptide
  MOD_RES (3)..(3): phosphoserine
RASSLNFLNK

SEQ ID NO: 681 - protein, 10 aa, Artificial Sequence
  Description of Artificial Sequence: Synthetic peptide
  MOD_RES (4)..(4): phosphoserine
RASSLNFLNK

SEQ ID NO: 682 - protein, 9 aa, Artificial Sequence
  Description of Artificial Sequence: Synthetic peptide
  MOD_RES (3)..(3): phosphothreonine
  MOD_RES (9)..(9): oxidized methionine
RATSNVFAM

SEQ ID NO: 683 - protein, 9 aa, Artificial Sequence
  Description of Artificial Sequence: Synthetic peptide
  MOD_RES (3)..(3): phosphothreonine
RATSNVFAM

SEQ ID NO: 684 - protein, 9 aa, Artificial Sequence
  Description of Artificial Sequence: Synthetic peptide
  MOD_RES (4)..(4): phosphoserine
  MOD_RES (9)..(9): oxidized methionine
RATSNVFAM

SEQ ID NO: 685 - protein, 9 aa, Artificial Sequence
  Description of Artificial Sequence: Synthetic peptide
  MOD_RES (4)..(4): phosphoserine
RATSNVFAM

SEQ ID NO: 686 - protein, 10 aa, Artificial Sequence
  Description of Artificial Sequence: Synthetic peptide
  MOD_RES (3)..(3): phosphothreonine
  MOD_RES (9)..(9): oxidized methionine
RATSNVFAMF

SEQ ID NO: 687 - protein, 10 aa, Artificial Sequence
  Description of Artificial Sequence: Synthetic peptide
  MOD_RES (3)..(3): phosphothreonine
RATSNVFAMF

SEQ ID NO: 688 - protein, 10 aa, Artificial Sequence
  Description of Artificial Sequence: Synthetic peptide
  MOD_RES (4)..(4): phosphoserine
  MOD_RES (9)..(9): oxidized methionine
RATSNVFAMF

SEQ ID NO: 689 - protein, 10 aa, Artificial Sequence
  Description of Artificial Sequence: Synthetic peptide
  MOD_RES (4)..(4): phosphoserine
RATSNVFAMF

SEQ ID NO: 690 - protein, 10 aa, Artificial Sequence
  Description of Artificial Sequence: Synthetic peptide
  MOD_RES (4)..(4): phosphoserine
RATSPLVSLY

SEQ ID NO: 691 - protein, 9 aa, Artificial Sequence
  Description of Artificial Sequence: Synthetic peptide
  MOD_RES (4)..(4): phosphoserine
RAVSPFAKI

SEQ ID NO: 692 - protein, 10 aa, Artificial Sequence
  Description of Artificial Sequence: Synthetic peptide
  MOD_RES (4)..(4): phosphoserine
  MOD_RES (10)..(10): oxidized methionine
RAVSPHFDDM

SEQ ID NO: 693 - protein, 10 aa, Artificial Sequence
  Description of Artificial Sequence: Synthetic peptide
  MOD_RES (4)..(4): phosphoserine
RAVSPHFDDM

SEQ ID NO: 694 - protein, 13 aa, Artificial Sequence
  Description of Artificial Sequence: Synthetic peptide
  MOD_RES (4)..(4): phosphoserine
RAYSPLHGGSGSY

SEQ ID NO: 695 - protein, 8 aa, Artificial Sequence
  Description of Artificial Sequence: Synthetic peptide
  MOD_RES (5)..(5): phosphoserine
  MOD_RES (8)..(8): oxidized methionine
REAPSPLM

SEQ ID NO: 696 - protein, 8 aa, Artificial Sequence
  Description of Artificial Sequence: Synthetic peptide
  MOD_RES (5)..(5): phosphoserine
REAPSPLM

SEQ ID NO: 697 - protein, 10 aa, Artificial Sequence
  Description of Artificial Sequence: Synthetic peptide
  MOD_RES (4)..(4): phosphoserine
  MOD_RES (10)..(10): oxidized methionine
REASIELPSM

SEQ ID NO: 698 - protein, 9 aa, Artificial Sequence
  Description of Artificial Sequence: Synthetic peptide
  MOD_RES (4)..(4): phosphoserine
REDSLEFSL

SEQ ID NO: 699 - protein, 9 aa, Artificial Sequence
  Description of Artificial Sequence: Synthetic peptide
  MOD_RES (8)..(8): phosphoserine
REDSLEFSL

SEQ ID NO: 700 - protein, 13 aa, Artificial Sequence
  Description of Artificial Sequence: Synthetic peptide
  MOD_RES (8)..(8): phosphothreonine
REFSGPSTPTGTL

SEQ ID NO: 701 - protein, 13 aa, Artificial Sequence
  Description of Artificial Sequence: Synthetic peptide
  MOD_RES (10)..(10): phosphothreonine
REFSGPSTPTGTL

SEQ ID NO: 702 - protein, 10 aa, Artificial Sequence
  Description of Artificial Sequence: Synthetic peptide
  MOD_RES (4)..(4): oxidized methionine
  MOD_RES (6)..(6): phosphothreonine
REIMGTPEYL

SEQ ID NO: 703 - protein, 10 aa, Artificial Sequence
  Description of Artificial Sequence: Synthetic peptide
  MOD_RES (4)..(4): phosphoserine
RELSAPARLY

SEQ ID NO: 704 - protein, 11 aa, Artificial Sequence
  Description of Artificial Sequence: Synthetic peptide
  MOD_RES (4)..(4): phosphoserine
RELSGTIKEIL

SEQ ID NO: 705 - protein, 10 aa, Artificial Sequence
  Description of Artificial Sequence: Synthetic peptide
  MOD_RES (4)..(4): phosphoserine
  MOD_RES (10)..(10): oxidized methionine
RELSPSSLKM

SEQ ID NO: 706 - protein, 10 aa, Artificial Sequence
  Description of Artificial Sequence: Synthetic peptide
  MOD_RES (4)..(4): phosphoserine
RELSPVSFQY

SEQ ID NO: 707 - protein, 11 aa, Artificial Sequence
  Description of Artificial Sequence: Synthetic peptide
  MOD_RES (4)..(4): phosphoserine
REPSESSPLAL

SEQ ID NO: 708 - protein, 11 aa, Artificial Sequence
  Description of Artificial Sequence: Synthetic peptide
  MOD_RES (7)..(7): phosphoserine
REPSESSPLAL

SEQ ID NO: 709 - protein, 11 aa, Artificial Sequence
  Description of Artificial Sequence: Synthetic peptide
  MOD_RES (4)..(4): phosphoserine
REPSPLPELAL

SEQ ID NO: 710 - protein, 11 aa, Artificial Sequence
  Description of Artificial Sequence: Synthetic peptide
  MOD_RES (4)..(4): phosphoserine
REPSPVRYDNL

SEQ ID NO: 711 - protein, 9 aa, Artificial Sequence
  Description of Artificial Sequence: Synthetic peptide
  MOD_RES (6)..(6): phosphoserine
RERAFSVKF

SEQ ID NO: 712 - protein, 9 aa, Artificial Sequence
  Description of Artificial Sequence: Synthetic peptide
  MOD_RES (3)..(3): phosphoserine
RESPIPIEI

SEQ ID NO: 713 - protein, 9 aa, Artificial Sequence
  Description of Artificial Sequence: Synthetic peptide
  MOD_RES (3)..(3): phosphoserine
RESPRPLQL

SEQ ID NO: 714 - protein, 9 aa, Artificial Sequence
  Description of Artificial Sequence: Synthetic peptide
  MOD_RES (4)..(4): phosphoserine
RESSLGFQL

SEQ ID NO: 715 - protein, 10 aa, Artificial Sequence
  Description of Artificial Sequence: Synthetic peptide
  MOD_RES (7)..(7): phosphoserine
RETNLDSLPL

SEQ ID NO: 716 - protein, 9 aa, Artificial Sequence
  Description of Artificial Sequence: Synthetic peptide
  MOD_RES (4)..(4): phosphoserine
RETSMVHEL

SEQ ID NO: 717 - protein, 10 aa, Artificial Sequence
  Description of Artificial Sequence: Synthetic peptide
  MOD_RES (4)..(4): phosphoserine
RETSPNRIGL

SEQ ID NO: 718 - protein, 9 aa, Artificial Sequence
  Description of Artificial Sequence: Synthetic peptide
  MOD_RES (4)..(4): phosphoserine
REVSPEPIV

SEQ ID NO: 719 - protein, 9 aa, Artificial Sequence
  Description of Artificial Sequence: Synthetic peptide
  MOD_RES (4)..(4): phosphoserine
  MOD_RES (5)..(5): oxidized methionine
RFQSMPVRL

SEQ ID NO: 720 - protein, 9 aa, Artificial Sequence
  Description of Artificial Sequence: Synthetic peptide
  MOD_RES (4)..(4): phosphoserine
RFQSMPVRL

SEQ ID NO: 721 - protein, 9 aa, Artificial Sequence
  Description of Artificial Sequence: Synthetic peptide
  MOD_RES (4)..(4): phosphoserine
RHKSDSISL

SEQ ID NO: 722 - protein, 9 aa, Artificial Sequence
  Description of Artificial Sequence: Synthetic peptide
  MOD_RES (5)..(5): phosphoserine
RHLPSPPTL

SEQ ID NO: 723 - protein, 9 aa, Artificial Sequence
  Description of Artificial Sequence: Synthetic peptide
  MOD_RES (4)..(4): phosphoserine
RIGSDPLAY

SEQ ID NO: 724 - protein, 10 aa, Artificial Sequence
  Description of Artificial Sequence: Synthetic peptide
  MOD_RES (5)..(5): phosphothreonine
RIIETPPHRY

SEQ ID NO: 725 - protein, 10 aa, Artificial Sequence
  Description of Artificial Sequence: Synthetic peptide
  MOD_RES (7)..(7): phosphotyrosine
RIKLGDYHFY

SEQ ID NO: 726 - protein, 9 aa, Artificial Sequence
  Description of Artificial Sequence: Synthetic peptide
  MOD_RES (5)..(5): phosphoserine
RILFSPFFH

SEQ ID NO: 727 - protein, 12 aa, Artificial Sequence
  Description of Artificial Sequence: Synthetic peptide
  MOD_RES (4)..(4): phosphoserine
RILSATTSGIFL

SEQ ID NO: 728 - protein, 11 aa, Artificial Sequence
  Description of Artificial Sequence: Synthetic peptide
  MOD_RES (4)..(4): phosphoserine
RILSDVTHSAV

SEQ ID NO: 729 - protein, 10 aa, Artificial Sequence
  Description of Artificial Sequence: Synthetic peptide
  MOD_RES (4)..(4): phosphoserine
  MOD_RES (10)..(10): oxidized methionine
RILSGVVTKM

SEQ ID NO: 730 - protein, 10 aa, Artificial Sequence
  Description of Artificial Sequence: Synthetic peptide
  MOD_RES (4)..(4): phosphoserine
RILSGVVTKM

SEQ ID NO: 731 - protein, 12 aa, Artificial Sequence
  Description of Artificial Sequence: Synthetic peptide
  MOD_RES (4)..(4): phosphoserine
RILSGVVTKMKM

SEQ ID NO: 732 - protein, 12 aa, Artificial Sequence
  Description of Artificial Sequence: Synthetic peptide
  MOD_RES (4)..(4): phosphoserine
RIMSPMRTGNTY

SEQ ID NO: 733 - protein, 10 aa, Artificial Sequence
  Description of Artificial Sequence: Synthetic peptide
  MOD_RES (4)..(4): phosphoserine
RIQSPLNNKL

SEQ ID NO: 734 - protein, 9 aa, Artificial Sequence
  Description of Artificial Sequence: Synthetic peptide
  MOD_RES (4)..(4): phosphoserine
RIRSIEALL

SEQ ID NO: 735 - protein, 9 aa, Artificial Sequence
  Description of Artificial Sequence: Synthetic peptide
  MOD_RES (3)..(3): phosphothreonine
RITSLIVHV

SEQ ID NO: 736 - protein, 10 aa, Artificial Sequence
  Description of Artificial Sequence: Synthetic peptide
  MOD_RES (4)..(4): phosphoserine
RITSPVHVSF

SEQ ID NO: 737 - protein, 11 aa, Artificial Sequence
  Description of Artificial Sequence: Synthetic peptide
  MOD_RES (4)..(4): phosphoserine
RIVSPKNSDLK

SEQ ID NO: 738 - protein, 9 aa, Artificial Sequence
  Description of Artificial Sequence: Synthetic peptide
  MOD_RES (4)..(4): phosphoserine
RIWSPTIGR

SEQ ID NO: 739 - protein, 9 aa, Artificial Sequence
  Description of Artificial Sequence: Synthetic peptide
  MOD_RES (6)..(6): phosphothreonine
RIWSPTIGR

SEQ ID NO: 740 - protein, 11 aa, Artificial Sequence
  Description of Artificial Sequence: Synthetic peptide
  MOD_RES (4)..(4): phosphoserine
RIYSRIDRLEA

SEQ ID NO: 741 - protein, 9 aa, Artificial Sequence
  Description of Artificial Sequence: Synthetic peptide
  MOD_RES (4)..(4): phosphoserine
RKFSAPGQL

SEQ ID NO: 742 - protein, 9 aa, Artificial Sequence
  Description of Artificial Sequence: Synthetic peptide
  MOD_RES (4)..(4): phosphoserine
RKLSFTESL

SEQ ID NO: 743 - protein, 9 aa, Artificial Sequence
  Description of Artificial Sequence: Synthetic peptide
  MOD_RES (6)..(6): phosphothreonine
RKLSFTESL

SEQ ID NO: 744 - protein, 10 aa, Artificial Sequence
  Description of Artificial Sequence: Synthetic peptide
  MOD_RES (4)..(4): phosphoserine
RKLSGDQITL

SEQ ID NO: 745 - protein, 9 aa, Artificial Sequence
  Description of Artificial Sequence: Synthetic peptide
  MOD_RES (4)..(4): phosphoserine
RKLSVALAF

SEQ ID NO: 746 - protein, 9 aa, Artificial Sequence
  Description of Artificial Sequence: Synthetic peptide
  MOD_RES (4)..(4): phosphoserine
RKLSVLLLL

SEQ ID NO: 747 - protein, 9 aa, Artificial Sequence
  Description of Artificial Sequence: Synthetic peptide
  MOD_RES (4)..(4): phosphoserine
  MOD_RES (7)..(7): oxidized methionine
RKNSFVMEY

SEQ ID NO: 748 - protein, 9 aa, Artificial Sequence
  Description of Artificial Sequence: Synthetic peptide
  MOD_RES (4)..(4): phosphoserine
RKNSFVMEY

SEQ ID NO: 749 - protein, 9 aa, Artificial Sequence
  Description of Artificial Sequence: Synthetic peptide
  MOD_RES (4)..(4): phosphoserine
RKNSLISSL

SEQ ID NO: 750 - protein, 9 aa, Artificial Sequence
  Description of Artificial Sequence: Synthetic peptide
  MOD_RES (4)..(4): phosphoserine
  MOD_RES (9)..(9): oxidized methionine
RKSSIIIRM

SEQ ID NO: 751 - protein, 9 aa, Artificial Sequence
  Description of Artificial Sequence: Synthetic peptide
  MOD_RES (4)..(4): phosphoserine
RLASLFSSL

SEQ ID NO: 752 - protein, 10 aa, Artificial Sequence
  Description of Artificial Sequence: Synthetic peptide
  MOD_RES (4)..(4): phosphoserine
RLASLMNLGM

SEQ ID NO: 753 - protein, 9 aa, Artificial Sequence
  Description of Artificial Sequence: Synthetic peptide
  MOD_RES (4)..(4): phosphoserine
RLASYLEKV

SEQ ID NO: 754 - protein, 9 aa, Artificial Sequence
  Description of Artificial Sequence: Synthetic peptide
  MOD_RES (4)..(4): phosphoserine
RLDSELKEL

SEQ ID NO: 755 - protein, 10 aa, Artificial Sequence
  Description of Artificial Sequence: Synthetic peptide
  MOD_RES (4)..(4): phosphoserine
RLDSGHVWKL

SEQ ID NO: 756 - protein, 9 aa, Artificial Sequence
  Description of Artificial Sequence: Synthetic peptide
  MOD_RES (4)..(4): phosphoserine
  MOD_RES (9)..(9): cysteinylated cysteine
RLFSKELRC

SEQ ID NO: 757 - protein, 10 aa, Artificial Sequence
  Description of Artificial Sequence: Synthetic peptide
  MOD_RES (4)..(4): phosphoserine
RLFSKSIETL

SEQ ID NO: 758 - protein, 9 aa, Artificial Sequence
  Description of Artificial Sequence: Synthetic peptide
  MOD_RES (4)..(4): phosphoserine
RLFSSFLKR

SEQ ID NO: 759 - protein, 10 aa, Artificial Sequence
  Description of Artificial Sequence: Synthetic peptide
  MOD_RES (4)..(4): phosphoserine
RLISLSEQNL

SEQ ID NO: 760 - protein, 10 aa, Artificial Sequence
  Description of Artificial Sequence: Synthetic peptide
  MOD_RES (6)..(6): phosphoserine
RLISLSEQNL

SEQ ID NO: 761 - protein, 9 aa, Artificial Sequence
  Description of Artificial Sequence: Synthetic peptide
  MOD_RES (4)..(4): phosphoserine
RLISQIVSS

SEQ ID NO: 762 - protein, 12 aa, Artificial Sequence
  Description of Artificial Sequence: Synthetic peptide
  MOD_RES (4)..(4): phosphoserine
RLISQIVSSITA

SEQ ID NO: 763 - protein, 9 aa, Artificial Sequence
  Description of Artificial Sequence: Synthetic peptide
  MOD_RES (4)..(4): phosphoserine
RLISVVSHL

SEQ ID NO: 764 - protein, 12 aa, Artificial Sequence
  Description of Artificial Sequence: Synthetic peptide
  MOD_RES (4)..(4): phosphoserine
RLKSIEERQLLK

SEQ ID NO: 765 - protein, 11 aa, Artificial Sequence
  Description of Artificial Sequence: Synthetic peptide
  MOD_RES (6)..(6): phosphoserine
RLLQDSVDFSL

SEQ ID NO: 766 - protein, 10 aa, Artificial Sequence
  Description of Artificial Sequence: Synthetic peptide
  MOD_RES (6)..(6): phosphoserine
RLLQDSVDSL

SEQ ID NO: 767 - protein, 9 aa, Artificial Sequence
  Description of Artificial Sequence: Synthetic peptide
  MOD_RES (4)..(4): phosphoserine
RLLSAAENF

SEQ ID NO: 768 - protein, 10 aa, Artificial Sequence
  Description of Artificial Sequence: Synthetic peptide
  MOD_RES (4)..(4): phosphoserine
RLLSEKILGL

SEQ ID NO: 769 - protein, 11 aa, Artificial Sequence
  Description of Artificial Sequence: Synthetic peptide
  MOD_RES (4)..(4): phosphoserine
RLLSIKEAFRL

SEQ ID NO: 770 - protein, 9 aa, Artificial Sequence
  Description of Artificial Sequence: Synthetic peptide
  MOD_RES (4)..(4): phosphoserine
RLLSVNIRV

SEQ ID NO: 771 - protein, 11 aa, Artificial Sequence
  Description of Artificial Sequence: Synthetic peptide
  MOD_RES (4)..(4): phosphoserine
RLNSPPSSIYK

SEQ ID NO: 772 - protein, 9 aa, Artificial Sequence
  Description of Artificial Sequence: Synthetic peptide
  MOD_RES (6)..(6): phosphoserine
RLPLPSPAL

SEQ ID NO: 773 - protein, 10 aa, Artificial Sequence
  Description of Artificial Sequence: Synthetic peptide
  MOD_RES (4)..(4): phosphoserine
RLPSDPFTHL

SEQ ID NO: 774 - protein, 12 aa, Artificial Sequence
  Description of Artificial Sequence: Synthetic peptide
  MOD_RES (4)..(4): phosphoserine
RLPSPTSPFSSL

SEQ ID NO: 775 - protein, 9 aa, Artificial Sequence
  Description of Artificial Sequence: Synthetic peptide
  MOD_RES (5)..(5): phosphoserine
RLPSSTLKR

SEQ ID NO: 776 - protein, 9 aa, Artificial Sequence
  Description of Artificial Sequence: Synthetic peptide
  MOD_RES (4)..(4): phosphothreonine
RLPTVLLKL

SEQ ID NO: 777 - protein, 8 aa, Artificial Sequence
  Description of Artificial Sequence: Synthetic peptide
  MOD_RES (7)..(7): phosphoserine
RLQHSFSF

SEQ ID NO: 778 - protein, 9 aa, Artificial Sequence
  Description of Artificial Sequence: Synthetic peptide
  MOD_RES (4)..(4): phosphoserine
RLRSSVPGV

SEQ ID NO: 779 - protein, 9 aa, Artificial Sequence
  Description of Artificial Sequence: Synthetic peptide
  MOD_RES (5)..(5): phosphoserine
RLRSSVPGV

SEQ ID NO: 780 - protein, 9 aa, Artificial Sequence
  Description of Artificial Sequence: Synthetic peptide
  MOD_RES (4)..(4): phosphoserine
  MOD_RES (8)..(8): oxidized methionine
RLRSYEDMI

SEQ ID NO: 781 - protein, 9 aa, Artificial Sequence
  Description of Artificial Sequence: Synthetic peptide
  MOD_RES (3)..(3): phosphoserine
RLSPVPVPR

SEQ ID NO: 782 - protein, 9 aa, Artificial Sequence
  Description of Artificial Sequence: Synthetic peptide
  MOD_RES (3)..(3): phosphoserine
RLSSVSVTY

SEQ ID NO: 783 - protein, 9 aa, Artificial Sequence
  Description of Artificial Sequence: Synthetic peptide
  MOD_RES (4)..(4): phosphoserine
RLSSVSVTY

SEQ ID NO: 784 - protein, 11 aa, Artificial Sequence
  Description of Artificial Sequence: Synthetic peptide
  MOD_RES (4)..(4): phosphothreonine
RLWTPPEDYRL

SEQ ID NO: 785 - protein, 9 aa, Artificial Sequence
  Description of Artificial Sequence: Synthetic peptide
  MOD_RES (5)..(5): phosphoserine
RLYKSEPEL

SEQ ID NO: 786 - protein, 9 aa, Artificial Sequence
  Description of Artificial Sequence: Synthetic peptide
  MOD_RES (4)..(4): phosphoserine
RLYSVSYLL

SEQ ID NO: 787 - protein, 11 aa, Artificial Sequence
  Description of Artificial Sequence: Synthetic peptide
  MOD_RES (2)..(2): oxidized methionine
  MOD_RES (4)..(4): phosphoserine
RMISHSELRKL

SEQ ID NO: 788 - protein, 11 aa, Artificial Sequence
  Description of Artificial Sequence: Synthetic peptide
  MOD_RES (4)..(4): phosphoserine
RMISHSELRKL

SEQ ID NO: 789 - protein, 10 aa, Artificial Sequence
  Description of Artificial Sequence: Synthetic peptide
  MOD_RES (4)..(4): phosphoserine
RMISKLEAQV

SEQ ID NO: 790 - protein, 10 aa, Artificial Sequence
  Description of Artificial Sequence: Synthetic peptide
  MOD_RES (2)..(2): oxidized methionine
  MOD_RES (4)..(4): phosphoserine
RMKSPFGSSF

SEQ ID NO: 791 - protein, 10 aa, Artificial Sequence
  Description of Artificial Sequence: Synthetic peptide
  MOD_RES (4)..(4): phosphoserine
RMKSPFGSSF

SEQ ID NO: 792 - protein, 10 aa, Artificial Sequence
  Description of Artificial Sequence: Synthetic peptide
  MOD_RES (2)..(2): oxidized methionine
  MOD_RES (4)..(4): phosphoserine
RMLSLRDQRL

SEQ ID NO: 793 - protein, 9 aa, Artificial Sequence
  Description of Artificial Sequence: Synthetic peptide
  MOD_RES (2)..(2): oxidized methionine
  MOD_RES (4)..(4): phosphoserine
RMYSFDDVL

SEQ ID NO: 794 - protein, 9 aa, Artificial Sequence
  Description of Artificial Sequence: Synthetic peptide
  MOD_RES (4)..(4): phosphoserine
RNASLERVL

SEQ ID NO: 795 - protein, 11 aa, Artificial Sequence
  Description of Artificial Sequence: Synthetic peptide
  MOD_RES (10)..(10): phosphoserine
RPADSAQLLSL

SEQ ID NO: 796 - protein, 11 aa, Artificial Sequence
  Description of Artificial Sequence: Synthetic peptide
  MOD_RES (5)..(5): phosphoserine
RPARSVPSIAA

SEQ ID NO: 797 - protein, 9 aa, Artificial Sequence
  Description of Artificial Sequence: Synthetic peptide
  MOD_RES (4)..(4): phosphoserine
RPASPALLL

SEQ ID NO: 798 - protein, 9 aa, Artificial Sequence
  Description of Artificial Sequence: Synthetic peptide
  MOD_RES (4)..(4): phosphoserine
RPASPLMHI

SEQ ID NO: 799 - protein, 9 aa, Artificial Sequence
  Description of Artificial Sequence: Synthetic peptide
  MOD_RES (6)..(6): phosphoserine
RPASPSLQL

SEQ ID NO: 800 - protein, 15 aa, Artificial Sequence
  Description of Artificial Sequence: Synthetic peptide
  MOD_RES (10)..(10): phosphoserine
RPFHGISTVSLPNSL

SEQ ID NO: 801 - protein, 10 aa, Artificial Sequence
  Description of Artificial Sequence: Synthetic peptide
  MOD_RES (4)..(4): phosphoserine
RPFSKPEIAL

SEQ ID NO: 802 - protein, 9 aa, Artificial Sequence
  Description of Artificial Sequence: Synthetic peptide
  MOD_RES (4)..(4): phosphoserine
RPFSREMDL

SEQ ID NO: 803 - protein, 11 aa, Artificial Sequence
  Description of Artificial Sequence: Synthetic peptide
  MOD_RES (10)..(10): phosphoserine
RPHLSGRKLSL

SEQ ID NO: 804 - protein, 9 aa, Artificial Sequence
  Description of Artificial Sequence: Synthetic peptide
  MOD_RES (4)..(4): phosphothreonine
RPHTPTPGI

SEQ ID NO: 805 - protein, 11 aa, Artificial Sequence
  Description of Artificial Sequence: Synthetic peptide
  MOD_RES (4)..(4): phosphothreonine
  MOD_RES (11)..(11): oxidized methionine
RPHTPTPGIYM

SEQ ID NO: 806 - protein, 11 aa, Artificial Sequence
  Description of Artificial Sequence: Synthetic peptide
  MOD_RES (6)..(6): phosphothreonine
RPHTPTPGIYM

SEQ ID NO: 807 - protein, 9 aa, Artificial Sequence
  Description of Artificial Sequence: Synthetic peptide
  MOD_RES (4)..(4): phosphoserine
RPISPRIGA

SEQ ID NO: 808 - protein, 10 aa, Artificial Sequence
  Description of Artificial Sequence: Synthetic peptide
  MOD_RES (4)..(4): phosphoserine
RPISVIGGVS

SEQ ID NO: 809 - protein, 9 aa, Artificial Sequence
  Description of Artificial Sequence: Synthetic peptide
  MOD_RES (4)..(4): phosphothreonine
RPITPVYTV

SEQ ID NO: 810 - protein, 10 aa, Artificial Sequence
  Description of Artificial Sequence: Synthetic peptide
  MOD_RES (4)..(4): phosphothreonine
RPITPVYTVA

SEQ ID NO: 811 - protein, 10 aa, Artificial Sequence
  Description of Artificial Sequence: Synthetic peptide
  MOD_RES (9)..(9): phosphoserine
RPKLHHSLSF

SEQ ID NO: 812 - protein, 10 aa, Artificial Sequence
  Description of Artificial Sequence: Synthetic peptide
  MOD_RES (7)..(7): phosphoserine
RPKPSSSPVI

SEQ ID NO: 813 - protein, 11 aa, Artificial Sequence
  Description of Artificial Sequence: Synthetic peptide
  MOD_RES (6)..(6): phosphoserine
RPKPSSSPVIF

SEQ ID NO: 814 - protein, 11 aa, Artificial Sequence
  Description of Artificial Sequence: Synthetic peptide
  MOD_RES (7)..(7): phosphoserine
RPKPSSSPVIF

SEQ ID NO: 815 - protein, 12 aa, Artificial Sequence
  Description of Artificial Sequence: Synthetic peptide
  MOD_RES (5)..(5): phosphoserine
RPKPSSSPVIFA

SEQ ID NO: 816 - protein, 12 aa, Artificial Sequence
  Description of Artificial Sequence: Synthetic peptide
  MOD_RES (6)..(6): phosphoserine
RPKPSSSPVIFA

SEQ ID NO: 817 - protein, 12 aa, Artificial Sequence
  Description of Artificial Sequence: Synthetic peptide
  MOD_RES (7)..(7): phosphoserine
RPKPSSSPVIFA

SEQ ID NO: 818 - protein, 10 aa, Artificial Sequence
  Description of Artificial Sequence: Synthetic peptide
  MOD_RES (4)..(4): phosphoserine
RPKSTPELAF

SEQ ID NO: 819 - protein, 9 aa, Artificial Sequence
  Description of Artificial Sequence: Synthetic peptide
  MOD_RES (4)..(4): phosphothreonine
RPKTPPPAP

SEQ ID NO: 820 - protein, 9 aa, Artificial Sequence
  Description of Artificial Sequence: Synthetic peptide
  MOD_RES (4)..(4): phosphoserine
RPLSKQLSA

SEQ ID NO: 821 - protein, 10 aa, Artificial Sequence
  Description of Artificial Sequence: Synthetic peptide
  MOD_RES (4)..(4): phosphoserine
RPLSLIQGPP

SEQ ID NO: 822 - protein, 8 aa, Artificial Sequence
  Description of Artificial Sequence: Synthetic peptide
  MOD_RES (4)..(4): phosphoserine
RPLSPFYL

SEQ ID NO: 823 - protein, 10 aa, Artificial Sequence
  Description of Artificial Sequence: Synthetic peptide
  MOD_RES (4)..(4): phosphoserine
RPLSPFYLSA

SEQ ID NO: 824 - protein, 10 aa, Artificial Sequence
  Description of Artificial Sequence: Synthetic peptide
  MOD_RES (4)..(4): phosphoserine
RPLSPGALQL

SEQ ID NO: 825 - protein, 10 aa, Artificial Sequence
  Description of Artificial Sequence: Synthetic peptide
  MOD_RES (4)..(4): phosphoserine
RPLSPILHIV

SEQ ID NO: 826 - protein, 11 aa, Artificial Sequence
  Description of Artificial Sequence: Synthetic peptide
  MOD_RES (4)..(4): phosphoserine
RPLSPKPSSPG

SEQ ID NO: 827 - protein, 14 aa, Artificial Sequence
  Description of Artificial Sequence: Synthetic peptide
  MOD_RES (4)..(4): phosphoserine
RPLSPKPSSPGSVL

SEQ ID NO: 828 - protein, 14 aa, Artificial Sequence
  Description of Artificial Sequence: Synthetic peptide
  MOD_RES (8)..(8): phosphoserine
RPLSPKPSSPGSVL

SEQ ID NO: 829 - protein, 12 aa, Artificial Sequence
  Description of Artificial Sequence: Synthetic peptide
  MOD_RES (4)..(4): phosphoserine
RPLSPTRLQPAL

SEQ ID NO: 830 - protein, 9 aa, Artificial Sequence
  Description of Artificial Sequence: Synthetic peptide
  MOD_RES (4)..(4): phosphothreonine
RPLTPRTPA

SEQ ID NO: 831 - protein, 11 aa, Artificial Sequence
  Description of Artificial Sequence: Synthetic peptide
  MOD_RES (4)..(4): phosphoserine
RPNSLVGITSA

SEQ ID NO: 832 - protein, 10 aa, Artificial Sequence
  Description of Artificial Sequence: Synthetic peptide
  MOD_RES (6)..(6): phosphoserine
RPNSPSPTAL

SEQ ID NO: 833 - protein, 10 aa, Artificial Sequence
  Description of Artificial Sequence: Synthetic peptide
  MOD_RES (4)..(4): phosphoserine
RPNSSALETL

SEQ ID NO: 834 - protein, 10 aa, Artificial Sequence
  Description of Artificial Sequence: Synthetic peptide
  MOD_RES (5)..(5): phosphoserine
RPNSSALETL

SEQ ID NO: 835 - protein, 11 aa, Artificial Sequence
  Description of Artificial Sequence: Synthetic peptide
  MOD_RES (4)..(4): phosphoserine
RPPSPGLRGLL

SEQ ID NO: 836 - protein, 13 aa, Artificial Sequence
  Description of Artificial Sequence: Synthetic peptide
  MOD_RES (7)..(7): phosphoserine
RPQESRSLSPSHL

SEQ ID NO: 837 - protein, 13 aa, Artificial Sequence
  Description of Artificial Sequence: Synthetic peptide
  MOD_RES (9)..(9): phosphoserine
RPQESRSLSPSHL

SEQ ID NO: 838 - protein, 11 aa, Artificial Sequence
  Description of Artificial Sequence: Synthetic peptide
  MOD_RES (4)..(4): phosphoserine
RPQSPPAEAVI

SEQ ID NO: 839 - protein, 12 aa, Artificial Sequence
  Description of Artificial Sequence: Synthetic peptide
  MOD_RES (4)..(4): phosphothreonine
RPQTPKEEAQAL

SEQ ID NO: 840 - protein, 13 aa, Artificial Sequence
  Description of Artificial Sequence: Synthetic peptide
  MOD_RES (6)..(6): phosphoserine
RPRAFSHSGVHSL

SEQ ID NO: 841 - protein, 11 aa, Artificial Sequence
  Description of Artificial Sequence: Synthetic peptide
  MOD_RES (6)..(6): phosphoserine
RPRAFSIASSL

SEQ ID NO: 842 - protein, 9 aa, Artificial Sequence
  Description of Artificial Sequence: Synthetic peptide
  MOD_RES (6)..(6): phosphothreonine
RPREVTVSL

SEQ ID NO: 843 - protein, 10 aa, Artificial Sequence
  Description of Artificial Sequence: Synthetic peptide
  MOD_RES (6)..(6): phosphoserine
RPRFMSSPVL

SEQ ID NO: 844 - protein, 10 aa, Artificial Sequence
  Description of Artificial Sequence: Synthetic peptide
  MOD_RES (7)..(7): phosphoserine
RPRFMSSPVL

SEQ ID NO: 845 - protein, 11 aa, Artificial Sequence
  Description of Artificial Sequence: Synthetic peptide
  MOD_RES (6)..(6): phosphoserine
  MOD_RES (11)..(11): oxidized methionine
RPRGPSPLVTM

SEQ ID NO: 846 - protein, 11 aa, Artificial Sequence
  Description of Artificial Sequence: Synthetic peptide
  MOD_RES (6)..(6): phosphoserine
RPRGPSPLVTM

SEQ ID NO: 847 - protein, 10 aa, Artificial Sequence
  Description of Artificial Sequence: Synthetic peptide
  MOD_RES (7)..(7): phosphoserine
RPRLQHSFSF

SEQ ID NO: 848 - protein, 10 aa, Artificial Sequence
  Description of Artificial Sequence: Synthetic peptide
  MOD_RES (9)..(9): phosphoserine
RPRLQHSFSF

SEQ ID NO: 849 - protein, 11 aa, Artificial Sequence
  Description of Artificial Sequence: Synthetic peptide
  MOD_RES (6)..(6): phosphoserine
RPRPSSVLRTL

SEQ ID NO: 850 - protein, 15 aa, Artificial Sequence
  Description of Artificial Sequence: Synthetic peptide
  MOD_RES (6)..(6): phosphoserine
RPRPVSPSSLLDTAI

SEQ ID NO: 851 - protein, 10 aa, Artificial Sequence
  Description of Artificial Sequence: Synthetic peptide
  MOD_RES (6)..(6): phosphoserine
RPRSISVEEF

SEQ ID NO: 852 - protein, 12 aa, Artificial Sequence
  Description of Artificial Sequence: Synthetic peptide
  MOD_RES (7)..(7): phosphoserine
RPRSLSSPTVTL

SEQ ID NO: 853 - protein, 10 aa, Artificial Sequence
  Description of Artificial Sequence: Synthetic peptide
  MOD_RES (4)..(4): phosphoserine
  MOD_RES (7)..(7): oxidized methionine
RPRSPNMQDL

SEQ ID NO: 854 - protein, 11 aa, Artificial Sequence
  Description of Artificial Sequence: Synthetic peptide
  MOD_RES (4)..(4): phosphoserine
RPRSPPEPLRV

SEQ ID NO: 855 - protein, 12 aa, Artificial Sequence
  Description of Artificial Sequence: Synthetic peptide
  MOD_RES (6)..(6): phosphothreonine
RPRSPTGPSNSF

SEQ ID NO: 856 - protein, 9 aa, Artificial Sequence
  Description of Artificial Sequence: Synthetic peptide
  MOD_RES (4)..(4): phosphothreonine
RPRTLRTRL

SEQ ID NO: 857 - protein, 9 aa, Artificial Sequence
  Description of Artificial Sequence: Synthetic peptide
  MOD_RES (3)..(3): phosphoserine
  MOD_RES (9)..(9): oxidized methionine
RPSSAPDLM

SEQ ID NO: 858 - protein, 9 aa, Artificial Sequence
  Description of Artificial Sequence: Synthetic peptide
  MOD_RES (3)..(3): phosphoserine
RPSSAPDLM

SEQ ID NO: 859 - protein, 9 aa, Artificial Sequence
  Description of Artificial Sequence: Synthetic peptide
  MOD_RES (4)..(4): phosphoserine
  MOD_RES (9)..(9): oxidized methionine
RPSSAPDLM

SEQ ID NO: 860 - protein, 9 aa, Artificial Sequence
  Description of Artificial Sequence: Synthetic peptide
  MOD_RES (4)..(4): phosphoserine
RPSSAPDLM

SEQ ID NO: 861 - protein, 9 aa, Artificial Sequence
  Description of Artificial Sequence: Synthetic peptide
  MOD_RES (3)..(3): phosphoserine
RPSSGFYEL

SEQ ID NO: 862 - protein, 9 aa, Artificial Sequence
  Description of Artificial Sequence: Synthetic peptide
  MOD_RES (3)..(3): phosphoserine
RPSSGQDLF

SEQ ID NO: 863 - protein, 9 aa, Artificial Sequence
  Description of Artificial Sequence: Synthetic peptide
  MOD_RES (4)..(4): phosphoserine
RPSSGQDLF

SEQ ID NO: 864 - protein, 9 aa, Artificial Sequence
  Description of Artificial Sequence: Synthetic peptide
  MOD_RES (4)..(4): phosphoserine
RPSSLRQYL

SEQ ID NO: 865 - protein, 11 aa, Artificial Sequence
  Description of Artificial Sequence: Synthetic peptide
  MOD_RES (4)..(4): phosphoserine
RPSSPLIDIKP

SEQ ID NO: 866 - protein, 10 aa, Artificial Sequence
  Description of Artificial Sequence: Synthetic peptide
  MOD_RES (3)..(3): phosphoserine
RPSSPVHVAF

SEQ ID NO: 867 - protein, 10 aa, Artificial Sequence
  Description of Artificial Sequence: Synthetic peptide
  MOD_RES (4)..(4): phosphoserine
RPSSPVHVAF

SEQ ID NO: 868 - protein, 11 aa, Artificial Sequence
  Description of Artificial Sequence: Synthetic peptide
  MOD_RES (4)..(4): phosphoserine
RPSSPVTVTAL

SEQ ID NO: 869 - protein, 11 aa, Artificial Sequence
  Description of Artificial Sequence: Synthetic peptide
  MOD_RES (4)..(4): phosphoserine
  MOD_RES (9)..(9): oxidized methionine
RPSSRVALMVL

SEQ ID NO: 870 - protein, 11 aa, Artificial Sequence
  Description of Artificial Sequence: Synthetic peptide
  MOD_RES (4)..(4): phosphoserine
RPSSRVALMVL

SEQ ID NO: 871 - protein, 10 aa, Artificial Sequence
  Description of Artificial Sequence: Synthetic peptide
  MOD_RES (4)..(4): phosphothreonine
RPSTPHTITL

SEQ ID NO: 872 - protein, 10 aa, Artificial Sequence
  Description of Artificial Sequence: Synthetic peptide
  MOD_RES (3)..(3): phosphoserine
RPSTPTINVL

SEQ ID NO: 873 - protein, 10 aa, Artificial Sequence
  Description of Artificial Sequence: Synthetic peptide
  MOD_RES (4)..(4): phosphothreonine
RPSTPTINVL

SEQ ID NO: 874 - protein, 10 aa, Artificial Sequence
  Description of Artificial Sequence: Synthetic peptide
  MOD_RES (6)..(6): phosphothreonine
RPSTPTINVL

SEQ ID NO: 875 - protein, 9 aa, Artificial Sequence
  Description of Artificial Sequence: Synthetic peptide
  MOD_RES (3)..(3): phosphothreonine
RPTSFADEL

SEQ ID NO: 876 - protein, 10 aa, Artificial Sequence
  Description of Artificial Sequence: Synthetic peptide
  MOD_RES (4)..(4): phosphoserine
RPTSISWDGL

SEQ ID NO: 877 - protein, 10 aa, Artificial Sequence
  Description of Artificial Sequence: Synthetic peptide
  MOD_RES (6)..(6): phosphoserine
RPTSISWDGL

SEQ ID NO: 878 - protein, 10 aa, Artificial Sequence
  Description of Artificial Sequence: Synthetic peptide
  MOD_RES (4)..(4): phosphoserine
RPTSPRLLTL

SEQ ID NO: 879 - protein, 10 aa, Artificial Sequence
  Description of Artificial Sequence: Synthetic peptide
  MOD_RES (9)..(9): phosphoserine
RPVDPRRRSL

SEQ ID NO: 880 - protein, 9 aa, Artificial Sequence
  Description of Artificial Sequence: Synthetic peptide
  MOD_RES (4)..(4): phosphoserine
RPVSEMFSL

SEQ ID NO: 881 - protein, 11 aa, Artificial Sequence
  Description of Artificial Sequence: Synthetic peptide
  MOD_RES (4)..(4): phosphoserine
RPVSMDARIQV

SEQ ID NO: 882 - protein, 11 aa, Artificial Sequence
  Description of Artificial Sequence: Synthetic peptide
  MOD_RES (4)..(4): phosphoserine
RPVSPGKDITA

SEQ ID NO: 883 - protein, 10 aa, Artificial Sequence
  Description of Artificial Sequence: Synthetic peptide
  MOD_RES (5)..(5): phosphothreonine
RPVSTDFAQY

SEQ ID NO: 884 - protein, 9 aa, Artificial Sequence
  Description of Artificial Sequence: Synthetic peptide
  MOD_RES (4)..(4): phosphothreonine
RPVTPITNF

SEQ ID NO: 885 - protein, 9 aa, Artificial Sequence
  Description of Artificial Sequence: Synthetic peptide
  MOD_RES (4)..(4): phosphothreonine
RPVTPPRTA

SEQ ID NO: 886 - protein, 9 aa, Artificial Sequence
  Description of Artificial Sequence: Synthetic peptide
  MOD_RES (3)..(3): oxidized tryptophan
  MOD_RES (4)..(4): phosphoserine
RPWSNSRGL

SEQ ID NO: 887 - protein, 9 aa, Artificial Sequence
  Description of Artificial Sequence: Synthetic peptide
  MOD_RES (3)..(3): oxidized tryptophan
  MOD_RES (4)..(4): phosphoserine
RPWSPAVSA

SEQ ID NO: 888 - protein, 10 aa, Artificial Sequence
  Description of Artificial Sequence: Synthetic peptide
  MOD_RES (5)..(5): phosphoserine
RPYPSPGAVL

SEQ ID NO: 889 - protein, 11 aa, Artificial Sequence
  Description of Artificial Sequence: Synthetic peptide
  MOD_RES (4)..(4): phosphoserine
RQASIELPSMA

SEQ ID NO: 890 - protein, 12 aa, Artificial Sequence
  Description of Artificial Sequence: Synthetic peptide
  MOD_RES (4)..(4): phosphoserine
  MOD_RES (10)..(10): oxidized methionine
RQASIELPSMAV

SEQ ID NO: 891 - protein, 13 aa, Artificial Sequence
  Description of Artificial Sequence: Synthetic peptide
  MOD_RES (4)..(4): phosphoserine
  MOD_RES (10)..(10): oxidized methionine
RQASIELPSMAVA

SEQ ID NO: 892 - protein, 15 aa, Artificial Sequence
  Description of Artificial Sequence: Synthetic peptide
  MOD_RES (4)..(4): phosphoserine
  MOD_RES (10)..(10): oxidized methionine
RQASIELPSMAVAST

SEQ ID NO: 893 - protein, 15 aa, Artificial Sequence
  Description of Artificial Sequence: Synthetic peptide
  MOD_RES (4)..(4): phosphoserine
RQASIELPSMAVAST

SEQ ID NO: 894 - protein, 9 aa, Artificial Sequence
  Description of Artificial Sequence: Synthetic peptide
  MOD_RES (6)..(6): phosphoserine
RQASLSISV

SEQ ID NO: 895 - protein, 11 aa, Artificial Sequence
  Description of Artificial Sequence: Synthetic peptide
  MOD_RES (10)..(10): phosphoserine
RQFDEESLESF

SEQ ID NO: 896 - protein, 9 aa, Artificial Sequence
  Description of Artificial Sequence: Synthetic peptide
  MOD_RES (8)..(8): phosphoserine
RQFTSSSSI

SEQ ID NO: 897 - protein, 9 aa, Artificial Sequence
  Description of Artificial Sequence: Synthetic peptide
  MOD_RES (5)..(5): phosphoserine
RQHFSPLSL

SEQ ID NO: 898 - protein, 11 aa, Artificial Sequence
  Description of Artificial Sequence: Synthetic peptide
  MOD_RES (6)..(6): phosphoserine
  MOD_RES (9)..(9): oxidized tryptophan
RQIQPSPPWSY

SEQ ID NO: 899 - protein, 11 aa, Artificial Sequence
  Description of Artificial Sequence: Synthetic peptide
  MOD_RES (6)..(6): phosphoserine
RQIQPSPPWSY

SEQ ID NO: 900 - protein, 11 aa, Artificial Sequence
  Description of Artificial Sequence: Synthetic peptide
  MOD_RES (4)..(4): phosphoserine
RQISIRGIVGV

SEQ ID NO: 901 - protein, 10 aa, Artificial Sequence
  Description of Artificial Sequence: Synthetic peptide
  MOD_RES (4)..(4): phosphoserine
RQISISEPQA

SEQ ID NO: 902 - protein, 11 aa, Artificial Sequence
  Description of Artificial Sequence: Synthetic peptide
  MOD_RES (4)..(4): phosphoserine
RQISISEPQAF

SEQ ID NO: 903 - protein, 12 aa, Artificial Sequence
  Description of Artificial Sequence: Synthetic peptide
  MOD_RES (4)..(4): phosphoserine
RQISISEPQAFL

SEQ ID NO: 904 - protein, 13 aa, Artificial Sequence
  Description of Artificial Sequence: Synthetic peptide
  MOD_RES (4)..(4): phosphoserine
RQISISEPQAFLF

SEQ ID NO: 905 - protein, 10 aa, Artificial Sequence
  Description of Artificial Sequence: Synthetic peptide
  MOD_RES (4)..(4): phosphoserine
RQISPEEFEY

SEQ ID NO: 906 - protein, 10 aa, Artificial Sequence
  Description of Artificial Sequence: Synthetic peptide
  MOD_RES (4)..(4): phosphoserine
RQKSPLFQFA

SEQ ID NO: 907 - protein, 9 aa, Artificial Sequence
  Description of Artificial Sequence: Synthetic peptide
  MOD_RES (4)..(4): phosphoserine
RQPSEEEII

SEQ ID NO: 908 - protein, 11 aa, Artificial Sequence
  Description of Artificial Sequence: Synthetic peptide
  MOD_RES (4)..(4): phosphoserine
RQPSEEEIIKL

SEQ ID NO: 909 - protein, 10 aa, Artificial Sequence
  Description of Artificial Sequence: Synthetic peptide
  MOD_RES (4)..(4): phosphoserine
RQPSWDPSPV

SEQ ID NO: 910 - protein, 13 aa, Artificial Sequence
  Description of Artificial Sequence: Synthetic peptide
  MOD_RES (6)..(6): phosphoserine
RQRSLSTSGESLY

SEQ ID NO: 911 - protein, 12 aa, Artificial Sequence
  Description of Artificial Sequence: Synthetic peptide
  MOD_RES (4)..(4): phosphoserine
RQVSEDPDIDSL

SEQ ID NO: 912 - protein, 10 aa, Artificial Sequence
  Description of Artificial Sequence: Synthetic peptide
  MOD_RES (4)..(4): phosphoserine
RRASLSDIGF

SEQ ID NO: 913 - protein, 11 aa, Artificial Sequence
  Description of Artificial Sequence: Synthetic peptide
  MOD_RES (7)..(7): phosphoserine
RRFRFPSGAEL

SEQ ID NO: 914 - protein, 9 aa, Artificial Sequence
  Description of Artificial Sequence: Synthetic peptide
  MOD_RES (4)..(4): phosphoserine
RRFSDFLGL

SEQ ID NO: 915 - protein, 10 aa, Artificial Sequence
  Description of Artificial Sequence: Synthetic peptide
  MOD_RES (6)..(6): phosphoserine
RRFSFSGNTL

SEQ ID NO: 916 - protein, 8 aa, Artificial Sequence
  Description of Artificial Sequence: Synthetic peptide
  MOD_RES (4)..(4): phosphoserine
RRFSGLLN

SEQ ID NO: 917 - protein, 9 aa, Artificial Sequence
  Description of Artificial Sequence: Synthetic peptide
  MOD_RES (4)..(4): phosphoserine
  MOD_RES (9)..(9): cysteinylated cysteine
RRFSGLLNC

SEQ ID NO: 918 - protein, 9 aa, Artificial Sequence
  Description of Artificial Sequence: Synthetic peptide
  MOD_RES (4)..(4): phosphoserine
RRFSGLLNC

SEQ ID NO: 919 - protein, 10 aa, Artificial Sequence
  Description of Artificial Sequence: Synthetic peptide
  MOD_RES (4)..(4): phosphoserine
RRFSGLSAEL

SEQ ID NO: 920 - protein, 9 aa, Artificial Sequence
  Description of Artificial Sequence: Synthetic peptide
  MOD_RES (4)..(4): phosphoserine
RRFSLDTDY

SEQ ID NO: 921 - protein, 10 aa, Artificial Sequence
  Description of Artificial Sequence: Synthetic peptide
  MOD_RES (4)..(4): phosphoserine
RRFSPPRRML

SEQ ID NO: 922 - protein, 9 aa, Artificial Sequence
  Description of Artificial Sequence: Synthetic peptide
  MOD_RES (4)..(4): phosphoserine
RRFSVTLRL

SEQ ID NO: 923 - protein, 9 aa, Artificial Sequence
  Description of Artificial Sequence: Synthetic peptide
  MOD_RES (4)..(4): phosphothreonine
RRFTEIYEF

SEQ ID NO: 924 - protein, 10 aa, Artificial Sequence
  Description of Artificial Sequence: Synthetic peptide
  MOD_RES (4)..(4): phosphothreonine
RRFTPPSTAL

SEQ ID NO: 925 - protein, 7 aa, Artificial Sequence
  Description of Artificial Sequence: Synthetic peptide
  MOD_RES (4)..(4): phosphoserine
RRGSFDA

SEQ ID NO: 926 - protein, 8 aa, Artificial Sequence
  Description of Artificial Sequence: Synthetic peptide
  MOD_RES (4)..(4): phosphoserine
RRGSFDAT

SEQ ID NO: 927 - protein, 9 aa, Artificial Sequence
  Description of Artificial Sequence: Synthetic peptide
  MOD_RES (4)..(4): phosphoserine
RRGSFDATG

SEQ ID NO: 928 - protein, 11 aa, Artificial Sequence
  Description of Artificial Sequence: Synthetic peptide
  MOD_RES (4)..(4): phosphoserine
RRGSFDATGSG

SEQ ID NO: 929 - protein, 12 aa, Artificial Sequence
  Description of Artificial Sequence: Synthetic peptide
  MOD_RES (4)..(4): phosphoserine
RRGSFDATGSGF

SEQ ID NO: 930 - protein, 14 aa, Artificial Sequence
  Description of Artificial Sequence: Synthetic peptide
  MOD_RES (4)..(4): phosphoserine
RRGSFDATGSGFSM

SEQ ID NO: 931 - protein, 16 aa, Artificial Sequence
  Description of Artificial Sequence: Synthetic peptide
  MOD_RES (4)..(4): phosphoserine
  MOD_RES (14)..(14): oxidized methionine
RRGSFDATGSGFSMTF

SEQ ID NO: 932 - protein, 16 aa, Artificial Sequence
  Description of Artificial Sequence: Synthetic peptide
  MOD_RES (4)..(4): phosphoserine
RRGSFDATGSGFSMTF

SEQ ID NO: 933 - protein, 10 aa, Artificial Sequence
  Description of Artificial Sequence: Synthetic peptide
  MOD_RES (4)..(4): phosphoserine
RRGSFEVTLL

SEQ ID NO: 934 - protein, 11 aa, Artificial Sequence
  Description of Artificial Sequence: Synthetic peptide
  MOD_RES (4)..(4): phosphoserine
RRGSGPEIFTF

SEQ ID NO: 935 - protein, 10 aa, Artificial Sequence
  Description of Artificial Sequence: Synthetic peptide
  MOD_RES (4)..(4): phosphoserine
RRGSPEMPFY

SEQ ID NO: 936 - protein, 12 aa, Artificial Sequence
  Description of Artificial Sequence: Synthetic peptide
  MOD_RES (6)..(6): phosphoserine
RRIDISPSTFRK

SEQ ID NO: 937 - protein, 12 aa, Artificial Sequence
  Description of Artificial Sequence: Synthetic peptide
  MOD_RES (8)..(8): phosphoserine
RRIDISPSTLRK

SEQ ID NO: 938 - protein, 9 aa, Artificial Sequence
  Description of Artificial Sequence: Synthetic peptide
  MOD_RES (6)..(6): phosphothreonine
RRISLTKRL

SEQ ID NO: 939 - protein, 9 aa, Artificial Sequence
  Description of Artificial Sequence: Synthetic peptide
  MOD_RES (7)..(7): oxidized tryptophan
  MOD_RES (8)..(8): phosphothreonine
RRLDRRWTL

SEQ ID NO: 940 - protein, 9 aa, Artificial Sequence
  Description of Artificial Sequence: Synthetic peptide
  MOD_RES (8)..(8): phosphothreonine
RRLDRRWTL

SEQ ID NO: 941 - protein, 10 aa, Artificial Sequence
  Description of Artificial Sequence: Synthetic peptide
  MOD_RES (4)..(4): phosphoserine
RRLSFQAEYW

SEQ ID NO: 942 - protein, 9 aa, Artificial Sequence
  Description of Artificial Sequence: Synthetic peptide
  MOD_RES (4)..(4): phosphoserine
RRLSLFLVL

SEQ ID NO: 943 - protein, 10 aa, Artificial Sequence
  Description of Artificial Sequence: Synthetic peptide
  MOD_RES (4)..(4): phosphoserine
RRLSVLVDDY

SEQ ID NO: 944 - protein, 10 aa, Artificial Sequence
  Description of Artificial Sequence: Synthetic peptide
  MOD_RES (4)..(4): phosphoserine
RRMSVGDRAG

SEQ ID NO: 945 - protein, 15 aa, Artificial Sequence
  Description of Artificial Sequence: Synthetic peptide
  MOD_RES (4)..(4): phosphoserine
RRMSVGDRAGSLPNY

SEQ ID NO: 946 - protein, 9 aa, Artificial Sequence
  Description of Artificial Sequence: Synthetic peptide
  MOD_RES (4)..(4): phosphoserine
RRNSLRIIF

SEQ ID NO: 947 - protein, 11 aa, Artificial Sequence
  Description of Artificial Sequence: Synthetic peptide
  MOD_RES (4)..(4): phosphoserine
RRPSQNAISFF

SEQ ID NO: 948 - protein, 9 aa, Artificial Sequence
  Description of Artificial Sequence: Synthetic peptide
  MOD_RES (4)..(4): phosphothreonine
RRPTLTTFF

SEQ ID NO: 949 - protein, 9 aa, Artificial Sequence
  Description of Artificial Sequence: Synthetic peptide
  MOD_RES (3)..(3): phosphoserine
RRSDSLLSF

SEQ ID NO: 950 - protein, 9 aa, Artificial Sequence
  Description of Artificial Sequence: Synthetic peptide
  MOD_RES (5)..(5): phosphoserine
RRSDSLLSF

SEQ ID NO: 951 - protein, 9 aa, Artificial Sequence
  Description of Artificial Sequence: Synthetic peptide
  MOD_RES (6)..(6): phosphoserine
RRSIISPNF

SEQ ID NO: 952 - protein, 13 aa, Artificial Sequence
  Description of Artificial Sequence: Synthetic peptide
  MOD_RES (3)..(3): phosphoserine
RRSSFSMEEGDVL

SEQ ID NO: 953 - protein, 13 aa, Artificial Sequence
  Description of Artificial Sequence: Synthetic peptide
  MOD_RES (4)..(4): phosphoserine
RRSSFSMEEGDVL

SEQ ID NO: 954 - protein, 9 aa, Artificial Sequence
  Description of Artificial Sequence: Synthetic peptide
  MOD_RES (3)..(3): phosphoserine
RRSSIPITV

SEQ ID NO: 955 - protein, 9 aa, Artificial Sequence
  Description of Artificial Sequence: Synthetic peptide
  MOD_RES (4)..(4): phosphoserine
RRSSISSWL

SEQ ID NO: 956 - protein, 9 aa, Artificial Sequence
  Description of Artificial Sequence: Synthetic peptide
  MOD_RES (3)..(3): phosphoserine
  MOD_RES (9)..(9): oxidized methionine
RRSSLLSLM

SEQ ID NO: 957 - protein, 9 aa, Artificial Sequence
  Description of Artificial Sequence: Synthetic peptide
  MOD_RES (3)..(3): phosphoserine
RRSSLLSLM

SEQ ID NO: 958 - protein, 9 aa, Artificial Sequence
  Description of Artificial Sequence: Synthetic peptide
  MOD_RES (4)..(4): phosphoserine
  MOD_RES (9)..(9): oxidized methionine
RRSSLLSLM

SEQ ID NO: 959 - protein, 9 aa, Artificial Sequence
  Description of Artificial Sequence: Synthetic peptide
  MOD_RES (3)..(3): phosphoserine
RRSSYLLAI

SEQ ID NO: 960 - protein, 9 aa, Artificial Sequence
  Description of Artificial Sequence: Synthetic peptide
  MOD_RES (4)..(4): phosphoserine
RRSSYLLAI

SEQ ID NO: 961 - protein, 9 aa, Artificial Sequence
  Description of Artificial Sequence: Synthetic peptide
  MOD_RES (3)..(3): phosphoserine
RRSTGVSFW

SEQ ID NO: 962 - protein, 9 aa, Artificial Sequence
  Description of Artificial Sequence: Synthetic peptide
  MOD_RES (4)..(4): phosphothreonine
RRSTGVSFW

SEQ ID NO: 963 - protein, 9 aa, Artificial Sequence
  Description of Artificial Sequence: Synthetic peptide
  MOD_RES (4)..(4): phosphoserine
RRTSIHDFL

SEQ ID NO: 964 - protein, 10 aa, Artificial Sequence
  Description of Artificial Sequence: Synthetic peptide
  MOD_RES (4)..(4): phosphoserine
RRVSLSEIGF

SEQ ID NO: 965 - protein, 11 aa, Artificial Sequence
  Description of Artificial Sequence: Synthetic peptide
  MOD_RES (4)..(4): phosphoserine
RRVSSNGIFDL

SEQ ID NO: 966 - protein, 11 aa, Artificial Sequence
  Description of Artificial Sequence: Synthetic peptide
  MOD_RES (5)..(5): phosphoserine
RRVSSNGIFDL

SEQ ID NO: 967 - protein, 9 aa, Artificial Sequence
  Description of Artificial Sequence: Synthetic peptide
  MOD_RES (4)..(4): phosphoserine
RRYSDFAKL

SEQ ID NO: 968 - protein, 9 aa, Artificial Sequence
  Description of Artificial Sequence: Synthetic peptide
  MOD_RES (6)..(6): phosphoserine
RSELLSFIK

SEQ ID NO: 969 - protein, 13 aa, Artificial Sequence
  Description of Artificial Sequence: Synthetic peptide
  MOD_RES (4)..(4): phosphoserine
RSFSADNFIGIQR

SEQ ID NO: 970 - protein, 9 aa, Artificial Sequence
  Description of Artificial Sequence: Synthetic peptide
  MOD_RES (4)..(4): phosphoserine
RSFSGLIKR

SEQ ID NO: 971 - protein, 11 aa, Artificial Sequence
  Description of Artificial Sequence: Synthetic peptide
  MOD_RES (4)..(4): phosphoserine
RSFSMHDLTTI

SEQ ID NO: 972 - protein, 11 aa, Artificial Sequence
  Description of Artificial Sequence: Synthetic peptide
  MOD_RES (4)..(4): phosphoserine
RSFSPKSPLEL

SEQ ID NO: 973 - protein, 9 aa, Artificial Sequence
  Description of Artificial Sequence: Synthetic peptide
  MOD_RES (4)..(4): phosphoserine
  MOD_RES (7)..(7): oxidized methionine
RSFSPTMKV

SEQ ID NO: 974 - protein, 9 aa, Artificial Sequence
  Description of Artificial Sequence: Synthetic peptide
  MOD_RES (6)..(6): phosphothreonine
RSFSPTMKV

SEQ ID NO: 975 - protein, 8 aa, Artificial Sequence
  Description of Artificial Sequence: Synthetic peptide
  MOD_RES (4)..(4): phosphothreonine
RSFTPLSI

SEQ ID NO: 976 - protein, 10 aa, Artificial Sequence
  Description of Artificial Sequence: Synthetic peptide
  MOD_RES (4)..(4): phosphothreonine
RSFTPLSILK

SEQ ID NO: 977 - protein, 9 aa, Artificial Sequence
  Description of Artificial Sequence: Synthetic peptide
  MOD_RES (4)..(4): phosphoserine
RSHSPPLKL

SEQ ID NO: 978 - protein, 10 aa, Artificial Sequence
  Description of Artificial Sequence: Synthetic peptide
  MOD_RES (6)..(6): phosphoserine
RSIRDSGYID

SEQ ID NO: 979 - protein, 12 aa, Artificial Sequence
  Description of Artificial Sequence: Synthetic peptide
  MOD_RES (6)..(6): phosphoserine
  MOD_RES (11)..(11): cysteinylated cysteine
  MOD_RES (12)..(12): oxidized tryptophan
RSIRDSGYIDCW

SEQ ID NO: 980 - protein, 12 aa, Artificial Sequence
  Description of Artificial Sequence: Synthetic peptide
  MOD_RES (6)..(6): phosphoserine
  MOD_RES (11)..(11): cysteinylated cysteine
RSIRDSGYIDCW

SEQ ID NO: 981 - protein, 10 aa, Artificial Sequence
  Description of Artificial Sequence: Synthetic peptide
  MOD_RES (6)..(6): phosphoserine
RSISASDLTF

SEQ ID NO: 982 - protein, 10 aa, Artificial Sequence
  Description of Artificial Sequence: Synthetic peptide
  MOD_RES (4)..(4): phosphoserine
RSISNEGLTL

SEQ ID NO: 983 - protein, 8 aa, Artificial Sequence
  Description of Artificial Sequence: Synthetic peptide
  MOD_RES (4)..(4): phosphoserine
RSISPLLF

SEQ ID NO: 984 - protein, 9 aa, Artificial Sequence
  Description of Artificial Sequence: Synthetic peptide
  MOD_RES (4)..(4): phosphoserine
RSISPWLAR

SEQ ID NO: 985 - protein, 11 aa, Artificial Sequence
  Description of Artificial Sequence: Synthetic peptide
  MOD_RES (4)..(4): phosphoserine
RSISQSSTDSY

SEQ ID NO: 986 - protein, 9 aa, Artificial Sequence
  Description of Artificial Sequence: Synthetic peptide
  MOD_RES (4)..(4): phosphoserine
RSISSLLRF

SEQ ID NO: 987 - protein, 9 aa, Artificial Sequence
  Description of Artificial Sequence: Synthetic peptide
  MOD_RES (4)..(4): phosphoserine
  MOD_RES (8)..(8): cysteinylated cysteine
RSISTPTCL

SEQ ID NO: 988 - protein, 9 aa, Artificial Sequence
  Description of Artificial Sequence: Synthetic peptide
  MOD_RES (4)..(4): phosphoserine
RSKSVIEQV

SEQ ID NO: 989 - protein, 11 aa, Artificial Sequence
  Description of Artificial Sequence: Synthetic peptide
  MOD_RES (4)..(4): phosphoserine
RSKSVIEQVSW

SEQ ID NO: 990 - protein, 9 aa, Artificial Sequence
  Description of Artificial Sequence: Synthetic peptide
  MOD_RES (4)..(4): phosphoserine
RSLSFSDEM

SEQ ID NO: 991 - protein, 9 aa, Artificial Sequence
  Description of Artificial Sequence: Synthetic peptide
  MOD_RES (4)..(4): phosphoserine
RSLSPFRRH

SEQ ID NO: 992 - protein, 12 aa, Artificial Sequence
  Description of Artificial Sequence: Synthetic peptide
  MOD_RES (4)..(4): phosphoserine
RSLSPIIGKDVL

SEQ ID NO: 993 - protein, 10 aa, Artificial Sequence
  Description of Artificial Sequence: Synthetic peptide
  MOD_RES (4)..(4): phosphoserine
RSLSPILPGR

SEQ ID NO: 994 - protein, 9 aa, Artificial Sequence
  Description of Artificial Sequence: Synthetic peptide
  MOD_RES (4)..(4): phosphoserine
  MOD_RES (6)..(6): oxidized methionine
RSLSPMSGL

SEQ ID NO: 995 - protein, 9 aa, Artificial Sequence
  Description of Artificial Sequence: Synthetic peptide
  MOD_RES (4)..(4): phosphoserine
RSLSPMSGL

SEQ ID NO: 996 - protein, 11 aa, Artificial Sequence
  Description of Artificial Sequence: Synthetic peptide
  MOD_RES (4)..(4): phosphoserine
RSLSPSSNSAF

SEQ ID NO: 997 - protein, 10 aa, Artificial Sequence
  Description of Artificial Sequence: Synthetic peptide
  MOD_RES (2)..(2): phosphoserine
RSLSQELVGV

SEQ ID NO: 998 - protein, 9 aa, Artificial Sequence
  Description of Artificial Sequence: Synthetic peptide
  MOD_RES (2)..(2): phosphoserine
RSLSVEIVY

SEQ ID NO: 999 - protein, 9 aa, Artificial Sequence
  Description of Artificial Sequence: Synthetic peptide
  MOD_RES (4)..(4): phosphoserine
RSLSVGSEF

SEQ ID NO: 1000 - protein, 9 aa, Artificial Sequence
  Description of Artificial Sequence: Synthetic peptide
  MOD_RES (4)..(4): phosphoserine
RSLSVPVDL

SEQ ID NO: 1001 - protein, 12 aa, Artificial Sequence
  Description of Artificial Sequence: Synthetic peptide
  MOD_RES (4)..(4): phosphoserine
RSLSVPVDLSRW

SEQ ID NO: 1002 - protein, 9 aa, Artificial Sequence
  Description of Artificial Sequence: Synthetic peptide
  MOD_RES (4)..(4): phosphothreonine
RSLTHPPTI

SEQ ID NO: 1003 - protein, 9 aa, Artificial Sequence
  Description of Artificial Sequence: Synthetic peptide
  MOD_RES (3)..(3): oxidized methionine
  MOD_RES (8)..(8): phosphothreonine
RSMDSVLTL

SEQ ID NO: 1004 - protein, 9 aa, Artificial Sequence
  Description of Artificial Sequence: Synthetic peptide
  MOD_RES (8)..(8): phosphothreonine
RSMDSVLTL

SEQ ID NO: 1005 - protein, 9 aa, Artificial Sequence
  Description of Artificial Sequence: Synthetic peptide
  MOD_RES (4)..(4): phosphoserine
RSNSPLPSI

SEQ ID NO: 1006 - protein, 10 aa, Artificial Sequence
  Description of Artificial Sequence: Synthetic peptide
  MOD_RES (4)..(4): phosphoserine
RSPSFGEDYY

SEQ ID NO: 1007 - protein, 9 aa, Artificial Sequence
  Description of Artificial Sequence: Synthetic peptide
  MOD_RES (4)..(4): phosphoserine
RSPSQDFSF

SEQ ID NO: 1008 - protein, 9 aa, Artificial Sequence
  Description of Artificial Sequence: Synthetic peptide
  MOD_RES (4)..(4): phosphoserine
RSQSLPNSL

SEQ ID NO: 1009 - protein, 10 aa, Artificial Sequence
  Description of Artificial Sequence: Synthetic peptide
  MOD_RES (4)..(4): phosphoserine
RSRSAPPNLW

SEQ ID NO: 1010 - protein, 9 aa, Artificial Sequence
  Description of Artificial Sequence: Synthetic peptide
  MOD_RES (4)..(4): phosphoserine
RSRSFDYNY

SEQ ID NO: 1011 - protein, 10 aa, Artificial Sequence
  Description of Artificial Sequence: Synthetic peptide
  MOD_RES (4)..(4): phosphoserine
RSRSFDYNYR

SEQ ID NO: 1012 - protein, 11 aa, Artificial Sequence
  Description of Artificial Sequence: Synthetic peptide
  MOD_RES (4)..(4): phosphoserine
RSRSFSGLIKR

SEQ ID NO: 1013 - protein, 11 aa, Artificial Sequence
  Description of Artificial Sequence: Synthetic peptide
  MOD_RES (6)..(6): phosphoserine
RSRSFSGLIKR

SEQ ID NO: 1014 - protein, 10 aa, Artificial Sequence
  Description of Artificial Sequence: Synthetic peptide
  MOD_RES (4)..(4): phosphoserine
RSRSPFSTTR

SEQ ID NO: 1015 - protein, 13 aa, Artificial Sequence
  Description of Artificial Sequence: Synthetic peptide
  MOD_RES (4)..(4): phosphoserine
RSRSPLELEPEAK

SEQ ID NO: 1016 - protein, 10 aa, Artificial Sequence
  Description of Artificial Sequence: Synthetic peptide
  MOD_RES (4)..(4): phosphoserine
RSRSPLGFYV

SEQ ID NO: 1017 - protein, 9 aa, Artificial Sequence
  Description of Artificial Sequence: Synthetic peptide
  MOD_RES (4)..(4): phosphoserine
RSRSPLLKF

SEQ ID NO: 1018 - protein, 12 aa, Artificial Sequence
  Description of Artificial Sequence: Synthetic peptide
  MOD_RES (4)..(4): phosphoserine
RSRSPSDSAAYF

SEQ ID NO: 1019 - protein, 9 aa, Artificial Sequence
  Description of Artificial Sequence: Synthetic peptide
  MOD_RES (4)..(4): phosphoserine
RSRSVPVSF

SEQ ID NO: 1020 - protein, 10 aa, Artificial Sequence
  Description of Artificial Sequence: Synthetic peptide
  MOD_RES (4)..(4): phosphoserine
RSSSFKDFAK

SEQ ID NO: 1021 - protein, 9 aa, Artificial Sequence
  Description of Artificial Sequence: Synthetic peptide
  MOD_RES (4)..(4): phosphoserine
RSSSFSDTL

SEQ ID NO: 1022 - protein, 9 aa, Artificial Sequence
  Description of Artificial Sequence: Synthetic peptide
  MOD_RES (3)..(3): phosphoserine
RSSSFVLPK

SEQ ID NO: 1023 - protein, 9 aa, Artificial Sequence
  Description of Artificial Sequence: Synthetic peptide
  MOD_RES (4)..(4): phosphoserine
RSSSFVLPK

SEQ ID NO: 1024 - protein, 10 aa, Artificial Sequence
  Description of Artificial Sequence: Synthetic peptide
  MOD_RES (2)..(2): phosphoserine
RSSSFVLPKL

SEQ ID NO: 1025 - protein, 10 aa, Artificial Sequence
  Description of Artificial Sequence: Synthetic peptide
  MOD_RES (3)..(3): phosphoserine
RSSSFVLPKL

SEQ ID NO: 1026 - protein, 10 aa, Artificial Sequence
  Description of Artificial Sequence: Synthetic peptide
  MOD_RES (4)..(4): phosphoserine
RSSSFVLPKL

SEQ ID NO: 1027 - protein, 10 aa, Artificial Sequence
  Description of Artificial Sequence: Synthetic peptide
  MOD_RES (2)..(2): phosphoserine
  MOD_RES (10)..(10): oxidized tryptophan
RSSSLSDFSW

SEQ ID NO: 1028 - protein, 10 aa, Artificial Sequence
  Description of Artificial Sequence: Synthetic peptide
  MOD_RES (2)..(2): phosphoserine
RSSSLSDFSW

SEQ ID NO: 1029 - protein, 10 aa, Artificial Sequence
  Description of Artificial Sequence: Synthetic peptide
  MOD_RES (3)..(3): phosphoserine
  MOD_RES (10)..(10): oxidized tryptophan
RSSSLSDFSW

SEQ ID NO: 1030 - protein, 10 aa, Artificial Sequence
  Description of Artificial Sequence: Synthetic peptide
  MOD_RES (3)..(3): phosphoserine
RSSSLSDFSW

SEQ ID NO: 1031 - protein, 10 aa, Artificial Sequence
  Description of Artificial Sequence: Synthetic peptide
  MOD_RES (4)..(4): phosphoserine
  MOD_RES (10)..(10): oxidized tryptophan
RSSSLSDFSW

SEQ ID NO: 1032 - protein, 10 aa, Artificial Sequence
  Description of Artificial Sequence: Synthetic peptide
  MOD_RES (4)..(4): phosphoserine
RSSSLSDFSW

SEQ ID NO: 1033 - protein, 9 aa, Artificial Sequence
  Description of Artificial Sequence: Synthetic peptide
  MOD_RES (2)..(2): phosphoserine
RSSSPFLSK

SEQ ID NO: 1034 - protein, 9 aa, Artificial Sequence
  Description of Artificial Sequence: Synthetic peptide
  MOD_RES (3)..(3): phosphoserine
RSSSPFLSK

SEQ ID NO: 1035 - protein, 10 aa, Artificial Sequence
  Description of Artificial Sequence: Synthetic peptide
  MOD_RES (4)..(4): phosphoserine
RSSSPPILTK

SEQ ID NO: 1036 - protein, 11 aa, Artificial Sequence
  Description of Artificial Sequence: Synthetic peptide
  MOD_RES (3)..(3): phosphoserine
RSSSTELLSHY

SEQ ID NO: 1037 - protein, 11 aa, Artificial Sequence
  Description of Artificial Sequence: Synthetic peptide
  MOD_RES (4)..(4): phosphoserine
RSSSTELLSHY

SEQ ID NO: 1038 - protein, 9 aa, Artificial Sequence
  Description of Artificial Sequence: Synthetic peptide
  MOD_RES (4)..(4): phosphoserine
RSSSWGRTY

SEQ ID NO: 1039 - protein, 9 aa, Artificial Sequence
  Description of Artificial Sequence: Synthetic peptide
  MOD_RES (4)..(4): phosphothreonine
RSSTPLPTI

SEQ ID NO: 1040 - protein, 9 aa, Artificial Sequence
  Description of Artificial Sequence: Synthetic peptide
  MOD_RES (2)..(2): phosphoserine
RSTSLSLKY

SEQ ID NO: 1041 - protein, 9 aa, Artificial Sequence
  Description of Artificial Sequence: Synthetic peptide
  MOD_RES (3)..(3): phosphothreonine
RSTSLSLKY

SEQ ID NO: 1042 - protein, 9 aa, Artificial Sequence
  Description of Artificial Sequence: Synthetic peptide
  MOD_RES (4)..(4): phosphoserine
RSTSLSLKY

SEQ ID NO: 1043 - protein, 11 aa, Artificial Sequence
  Description of Artificial Sequence: Synthetic peptide
  MOD_RES (4)..(4): phosphoserine
RSVSFKLLERW

SEQ ID NO: 1044 - protein, 9 aa, Artificial Sequence
  Description of Artificial Sequence: Synthetic peptide
  MOD_RES (4)..(4): phosphoserine
RSVSPVQDL

SEQ ID NO: 1045 - protein, 9 aa, Artificial Sequence
  Description of Artificial Sequence: Synthetic peptide
  MOD_RES (4)..(4): phosphoserine
RSVSVATGL

SEQ ID NO: 1046 - protein, 11 aa, Artificial Sequence
  Description of Artificial Sequence: Synthetic peptide
  MOD_RES (4)..(4): phosphoserine
RSWSPPPEVSR

SEQ ID NO: 1047 - protein, 9 aa, Artificial Sequence
  Description of Artificial Sequence: Synthetic peptide
  MOD_RES (8)..(8): phosphoserine
RSYRTDISM

SEQ ID NO: 1048 - protein, 10 aa, Artificial Sequence
  Description of Artificial Sequence: Synthetic peptide
  MOD_RES (4)..(4): phosphoserine
RTASPPALPK

SEQ ID NO: 1049 - protein, 10 aa, Artificial Sequence
  Description of Artificial Sequence: Synthetic peptide
  MOD_RES (4)..(4): phosphoserine
RTFSDESNVL

SEQ ID NO: 1050 - protein, 9 aa, Artificial Sequence
  Description of Artificial Sequence: Synthetic peptide
  MOD_RES (2)..(2): phosphothreonine
RTFSLDTIL

SEQ ID NO: 1051 - protein, 12 aa, Artificial Sequence
  Description of Artificial Sequence: Synthetic peptide
  MOD_RES (4)..(4): phosphoserine
RTFSLDTILSSY

SEQ ID NO: 1052 - protein, 9 aa, Artificial Sequence
  Description of Artificial Sequence: Synthetic peptide
  MOD_RES (6)..(6): phosphothreonine
RTFSPTYGL

SEQ ID NO: 1053 - protein, 9 aa, Artificial Sequence
  Description of Artificial Sequence: Synthetic peptide
  MOD_RES (2)..(2): phosphothreonine
RTHSLLLLL

SEQ ID NO: 1054 - protein, 11 aa, Artificial Sequence
  Description of Artificial Sequence: Synthetic peptide
  MOD_RES (2)..(2): phosphothreonine
RTISAQDTLAY

SEQ ID NO: 1055 - protein, 11 aa, Artificial Sequence
  Description of Artificial Sequence: Synthetic peptide
  MOD_RES (4)..(4): phosphoserine
RTISAQDTLAY

SEQ ID NO: 1056 - protein, 11 aa, Artificial Sequence
  Description of Artificial Sequence: Synthetic peptide
  MOD_RES (4)..(4): phosphoserine
  MOD_RES (10)..(10): oxidized methionine
RTISNPEVVMK

SEQ ID NO: 1057 - protein, 11 aa, Artificial Sequence
  Description of Artificial Sequence: Synthetic peptide
  MOD_RES (4)..(4): phosphoserine
RTISNPEVVMK

SEQ ID NO: 1058 - protein, 9 aa, Artificial Sequence
  Description of Artificial Sequence: Synthetic peptide
  MOD_RES (4)..(4): phosphoserine
RTKSFLNYY

SEQ ID NO: 1059 - protein, 13 aa, Artificial Sequence
  Description of Artificial Sequence: Synthetic peptide
  MOD_RES (4)..(4): phosphoserine
RTLSESFSRIALK

SEQ ID NO: 1060 - protein, 11 aa, Artificial Sequence
  Description of Artificial Sequence: Synthetic peptide
  MOD_RES (4)..(4): phosphoserine
RTLSGSILDVY

SEQ ID NO: 1061 - protein, 11 aa, Artificial Sequence
  Description of Artificial Sequence: Synthetic peptide
  MOD_RES (2)..(2): phosphothreonine
  MOD_RES (3)..(3): oxidized methionine
RTMSEAALVRK

SEQ ID NO: 1062 - protein, 11 aa, Artificial Sequence
  Description of Artificial Sequence: Synthetic peptide
  MOD_RES (2)..(2): phosphothreonine
RTMSEAALVRK

SEQ ID NO: 1063 - protein, 9 aa, Artificial Sequence
  Description of Artificial Sequence: Synthetic peptide
  MOD_RES (3)..(3): oxidized methionine
  MOD_RES (4)..(4): phosphoserine
RTMSPIQVL

SEQ ID NO: 1064 - protein, 9 aa, Artificial Sequence
  Description of Artificial Sequence: Synthetic peptide
  MOD_RES (4)..(4): phosphoserine
RTMSPIQVL

SEQ ID NO: 1065 - protein, 10 aa, Artificial Sequence
  Description of Artificial Sequence: Synthetic peptide
  MOD_RES (4)..(4): phosphoserine
RTPSPARPAL

SEQ ID NO: 1066 - protein, 9 aa, Artificial Sequence
  Description of Artificial Sequence: Synthetic peptide
  MOD_RES (5)..(5): phosphoserine
RTRLSPPRA

SEQ ID NO: 1067 - protein, 9 aa, Artificial Sequence
  Description of Artificial Sequence: Synthetic peptide
  MOD_RES (4)..(4): phosphoserine
RTVSPAHVL

SEQ ID NO: 1068 - protein, 9 aa, Artificial Sequence
  Description of Artificial Sequence: Synthetic peptide
  MOD_RES (4)..(4): phosphoserine
  MOD_RES (9)..(9): oxidized methionine
RTYSFTSAM

SEQ ID NO: 1069 - protein, 9 aa, Artificial Sequence
  Description of Artificial Sequence: Synthetic peptide
  MOD_RES (4)..(4): phosphoserine
RTYSFTSAM

SEQ ID NO: 1070 - protein, 9 aa, Artificial Sequence
  Description of Artificial Sequence: Synthetic peptide
  MOD_RES (6)..(6): phosphothreonine
RVASPTSGV

SEQ ID NO: 1071 - protein, 8 aa, Artificial Sequence
  Description of Artificial Sequence: Synthetic peptide
  MOD_RES (7)..(7): phosphoserine
RVDSLVSL

SEQ ID NO: 1072 - protein, 9 aa, Artificial Sequence
  Description of Artificial Sequence: Synthetic peptide
  MOD_RES (4)..(4): phosphoserine
  MOD_RES (7)..(7): cysteinylated cysteine
RVDSTTCLF

SEQ ID NO: 1073 - protein, 9 aa, Artificial Sequence
  Description of Artificial Sequence: Synthetic peptide
  MOD_RES (5)..(5): phosphothreonine
  MOD_RES (7)..(7): cysteinylated cysteine
RVDSTTCLF

SEQ ID NO: 1074 - protein, 9 aa, Artificial Sequence
  Description of Artificial Sequence: Synthetic peptide
  MOD_RES (6)..(6): phosphothreonine
  MOD_RES (7)..(7): cysteinylated cysteine
RVDSTTCLF

SEQ ID NO: 1075 - protein, 11 aa, Artificial Sequence
  Description of Artificial Sequence: Synthetic peptide
  MOD_RES (4)..(4): phosphoserine
RVISLEDFMEK

SEQ ID NO: 1076 - protein, 10 aa, Artificial Sequence
  Description of Artificial Sequence: Synthetic peptide
  MOD_RES (6)..(6): phosphothreonine
RVKTPTSQSY

SEQ ID NO: 1077 - protein, 12 aa, Artificial Sequence
  Description of Artificial Sequence: Synthetic peptide
  MOD_RES (9)..(9): phosphoserine
RVKVDGPRSPSY

SEQ ID NO: 1078 - protein, 12 aa, Artificial Sequence
  Description of Artificial Sequence: Synthetic peptide
  MOD_RES (11)..(11): phosphoserine
RVKVDGPRSPSY

SEQ ID NO: 1079 - protein, 9 aa, Artificial Sequence
  Description of Artificial Sequence: Synthetic peptide
  MOD_RES (4)..(4): phosphoserine
  MOD_RES (7)..(7): oxidized methionine
RVLSPLMSR

SEQ ID NO: 1080 - protein, 9 aa, Artificial Sequence
  Description of Artificial Sequence: Synthetic peptide
  MOD_RES (4)..(4): phosphoserine
RVLSPLMSR

SEQ ID NO: 1081 - protein, 9 aa, Artificial Sequence
  Description of Artificial Sequence: Synthetic peptide
  MOD_RES (4)..(4): phosphoserine
RVPSINQKI

SEQ ID NO: 1082 - protein, 10 aa, Artificial Sequence
  Description of Artificial Sequence: Synthetic peptide
  MOD_RES (4)..(4): phosphoserine
RVRSFLRGLP

SEQ ID NO: 1083 - protein, 10 aa, Artificial Sequence
  Description of Artificial Sequence: Synthetic peptide
  MOD_RES (4)..(4): phosphoserine
RVRSPGTGAF

SEQ ID NO: 1084 - protein, 9 aa, Artificial Sequence
  Description of Artificial Sequence: Synthetic peptide
  MOD_RES (3)..(3): phosphoserine
RVSSLTLHL

SEQ ID NO: 1085 - protein, 9 aa, Artificial Sequence
  Description of Artificial Sequence: Synthetic peptide
  MOD_RES (4)..(4): phosphoserine
RVSSLTLHL

SEQ ID NO: 1086 - protein, 9 aa, Artificial Sequence
  Description of Artificial Sequence: Synthetic peptide
  MOD_RES (6)..(6): phosphothreonine
RVSSLTLHL

SEQ ID NO: 1087 - protein, 9 aa, Artificial Sequence
  Description of Artificial Sequence: Synthetic peptide
  MOD_RES (5)..(5): phosphothreonine
RVVLTPLKV

SEQ ID NO: 1088 - protein, 9 aa, Artificial Sequence
  Description of Artificial Sequence: Synthetic peptide
  MOD_RES (4)..(4): phosphoserine
RVVSPGIDL

SEQ ID NO: 1089 - protein, 11 aa, Artificial Sequence
  Description of Artificial Sequence: Synthetic peptide
  MOD_RES (4)..(4): phosphoserine
RVYSLDDIRRY

SEQ ID NO: 1090 - protein, 9 aa, Artificial Sequence
  Description of Artificial Sequence: Synthetic peptide
  MOD_RES (4)..(4): phosphoserine
RVYSRFEVF

SEQ ID NO: 1091 - protein, 11 aa, Artificial Sequence
  Description of Artificial Sequence: Synthetic peptide
  MOD_RES (5)..(5): phosphoserine
RVYYSPPVARR

SEQ ID NO: 1092 - protein, 9 aa, Artificial Sequence
  Description of Artificial Sequence: Synthetic peptide
  MOD_RES (4)..(4): phosphoserine
RWNSKENLL

SEQ ID NO: 1093 - protein, 10 aa, Artificial Sequence
  Description of Artificial Sequence: Synthetic peptide
  MOD_RES (6)..(6): phosphoserine
RYARYSPRQR

SEQ ID NO: 1094 - protein, 9 aa, Artificial Sequence
  Description of Artificial Sequence: Synthetic peptide
  MOD_RES (4)..(4): phosphoserine
RYDSRTTIF

SEQ ID NO: 1095 - protein, 9 aa, Artificial Sequence
  Description of Artificial Sequence: Synthetic peptide
  MOD_RES (5)..(5): phosphothreonine
RYFKTPRKF

SEQ ID NO: 1096 - protein, 10 aa, Artificial Sequence
  Description of Artificial Sequence: Synthetic peptide
  MOD_RES (4)..(4): phosphoserine
  MOD_RES (8)..(8): oxidized methionine
RYHSLAPMYY

SEQ ID NO: 1097 - protein, 10 aa, Artificial Sequence
  Description of Artificial Sequence: Synthetic peptide
  MOD_RES (4)..(4): phosphoserine
RYHSLAPMYY

SEQ ID NO: 1098 - protein, 9 aa, Artificial Sequence
  Description of Artificial Sequence: Synthetic peptide
  MOD_RES (3)..(3): phosphothreonine
RYTNRVVTL

SEQ ID NO: 1099 - protein, 11 aa, Artificial Sequence
  Description of Artificial Sequence: Synthetic peptide
  MOD_RES (4)..(4): phosphoserine
SAFSSRGSLSL

SEQ ID NO: 1100 - protein, 9 aa, Artificial Sequence
  Description of Artificial Sequence: Synthetic peptide
  MOD_RES (1)..(1): phosphoserine
SAISPTPEI

SEQ ID NO: 1101 - protein, 9 aa, Artificial Sequence
  Description of Artificial Sequence: Synthetic peptide
  MOD_RES (4)..(4): phosphoserine
SAISPTPEI

SEQ ID NO: 1102 - protein, 13 aa, Artificial Sequence
  Description of Artificial Sequence: Synthetic peptide
  MOD_RES (8)..(8): phosphoserine
SAYGGLTSPGLSY

SEQ ID NO: 1103 - protein, 9 aa, Artificial Sequence
  Description of Artificial Sequence: Synthetic peptide
  MOD_RES (4)..(4): phosphoserine
SEASLASAL

SEQ ID NO: 1104 - protein, 9 aa, Artificial Sequence
  Description of Artificial Sequence: Synthetic peptide
  MOD_RES (6)..(6): oxidized methionine
  MOD_RES (8)..(8): phosphoserine
SEFKAMDSI

SEQ ID NO: 1105 - protein, 9 aa, Artificial Sequence
  Description of Artificial Sequence: Synthetic peptide
  MOD_RES (4)..(4): phosphoserine
SEFSDVDKL

SEQ ID NO: 1106 - protein, 11 aa, Artificial Sequence
  Description of Artificial Sequence: Synthetic peptide
  MOD_RES (4)..(4): phosphoserine
SEISPIKGSVR

SEQ ID NO: 1107 - protein, 10 aa, Artificial Sequence
  Description of Artificial Sequence: Synthetic peptide
  MOD_RES (5)..(5): phosphoserine
SELRSPRISY

SEQ ID NO: 1108 - protein, 9 aa, Artificial Sequence
  Description of Artificial Sequence: Synthetic peptide
  MOD_RES (4)..(4): phosphothreonine
SELTPSESL

SEQ ID NO: 1109 - protein, 9 aa, Artificial Sequence
  Description of Artificial Sequence: Synthetic peptide
  MOD_RES (6)..(6): phosphoserine
SELTPSESL

SEQ ID NO: 1110 - protein, 10 aa, Artificial Sequence
  Description of Artificial Sequence: Synthetic peptide
  MOD_RES (3)..(3): phosphoserine
SESSIKKKFL

SEQ ID NO: 1111 - protein, 10 aa, Artificial Sequence
  Description of Artificial Sequence: Synthetic peptide
  MOD_RES (4)..(4): phosphoserine
SESSIKKKFL

SEQ ID NO: 1112 - protein, 9 aa, Artificial Sequence
  Description of Artificial Sequence: Synthetic peptide
  MOD_RES (4)..(4): phosphoserine
SFDSREASF

SEQ ID NO: 1113 - protein, 13 aa, Artificial Sequence
  Description of Artificial Sequence: Synthetic peptide
  MOD_RES (4)..(4): phosphoserine
SFLSQDESHDHSF

SEQ ID NO: 1114 - protein, 14 aa, Artificial Sequence
  Description of Artificial Sequence: Synthetic peptide
  MOD_RES (1)..(1): phosphoserine
SGEGDFLAEGGGVR

SEQ ID NO: 1115 - protein, 9 aa, Artificial Sequence
  Description of Artificial Sequence: Synthetic peptide
  MOD_RES (5)..(5): phosphoserine
  MOD_RES (9)..(9): oxidized tryptophan
SGFRSPHLW

SEQ ID NO: 1116 - protein, 9 aa, Artificial Sequence
  Description of Artificial Sequence: Synthetic peptide
  MOD_RES (5)..(5): phosphoserine
SGFRSPHLW

SEQ ID NO: 1117 - protein, 9 aa, Artificial Sequence
  Description of Artificial Sequence: Synthetic peptide
  MOD_RES (5)..(5): phosphoserine
SIDISQDKL

SEQ ID NO: 1118 - protein, 9 aa, Artificial Sequence
  Description of Artificial Sequence: Synthetic peptide
  MOD_RES (1)..(1): phosphoserine
SIDSPKSYI

SEQ ID NO: 1119 - protein, 9 aa, Artificial Sequence
  Description of Artificial Sequence: Synthetic peptide
  MOD_RES (5)..(5): phosphothreonine
SIFRTPISK

SEQ ID NO: 1120 - protein, 8 aa, Artificial Sequence
  Description of Artificial Sequence: Synthetic peptide
  MOD_RES (7)..(7): phosphothreonine
SIIKEKTV

SEQ ID NO: 1121 - protein, 11 aa, Artificial Sequence
  Description of Artificial Sequence: Synthetic peptide
  MOD_RES (4)..(4): phosphoserine
SIISPKVKMAL

SEQ ID NO: 1122 - protein, 9 aa, Artificial Sequence
  Description of Artificial Sequence: Synthetic peptide
  MOD_RES (4)..(4): phosphoserine
SIISPNFSF

SEQ ID NO: 1123 - protein, 9 aa, Artificial Sequence
  Description of Artificial Sequence: Synthetic peptide
  MOD_RES (4)..(4): phosphoserine
SILSRTPSV

SEQ ID NO: 1124 - protein, 9 aa, Artificial Sequence
  Description of Artificial Sequence: Synthetic peptide
  MOD_RES (1)..(1): phosphoserine
SIPSLVDGF

SEQ ID NO: 1125 - protein, 9 aa, Artificial Sequence
  Description of Artificial Sequence: Synthetic peptide
  MOD_RES (4)..(4): phosphoserine
SIPSLVDGF

SEQ ID NO: 1126 - protein, 9 aa, Artificial Sequence
  Description of Artificial Sequence: Synthetic peptide
  MOD_RES (6)..(6): phosphoserine
SIPTVSGQI

SEQ ID NO: 1127 - protein, 9 aa, Artificial Sequence
  Description of Artificial Sequence: Synthetic peptide
  MOD_RES (4)..(4): phosphoserine
SISSIDREL

SEQ ID NO: 1128 - protein, 9 aa, Artificial Sequence
  Description of Artificial Sequence: Synthetic peptide
  MOD_RES (4)..(4): phosphoserine
  MOD_RES (5)..(5): oxidized methionine
SISSMEVNV

SEQ ID NO: 1129 - protein, 8 aa, Artificial Sequence
  Description of Artificial Sequence: Synthetic peptide
  MOD_RES (3)..(3): phosphoserine
SISTLVTL

SEQ ID NO: 1130 - protein, 8 aa, Artificial Sequence
  Description of Artificial Sequence: Synthetic peptide
  MOD_RES (4)..(4): phosphothreonine
SISTLVTL

SEQ ID NO: 1131 - protein, 9 aa, Artificial Sequence
  Description of Artificial Sequence: Synthetic peptide
  MOD_RES (3)..(3): phosphothreonine
SITSLEAII

SEQ ID NO: 1132 - protein, 11 aa, Artificial Sequence
  Description of Artificial Sequence: Synthetic peptide
  MOD_RES (4)..(4): phosphoserine
SIVSPRKLPAL

SEQ ID NO: 1133 - protein, 10 aa, Artificial Sequence
  Description of Artificial Sequence: Synthetic peptide
  MOD_RES (7)..(7): phosphothreonine
SKMAFLTRVA

SEQ ID NO: 1134 - protein, 9 aa, Artificial Sequence
  Description of Artificial Sequence: Synthetic peptide
  MOD_RES (4)..(4): phosphoserine
SLASKVTRL

SEQ ID NO: 1135 - protein, 9 aa, Artificial Sequence
  Description of Artificial Sequence: Synthetic peptide
  MOD_RES (4)..(4): phosphoserine
SLASLLAKV

SEQ ID NO: 1136 - protein, 12 aa, Artificial Sequence
  Description of Artificial Sequence: Synthetic peptide
  MOD_RES (4)..(4): phosphoserine
  MOD_RES (10)..(10): oxidized methionine
SLDSPGPEKMAL

SEQ ID NO: 1137 - protein, 12 aa, Artificial Sequence
  Description of Artificial Sequence: Synthetic peptide
  MOD_RES (4)..(4): phosphoserine
SLDSPGPEKMAL

SEQ ID NO: 1138 - protein, 9 aa, Artificial Sequence
  Description of Artificial Sequence: Synthetic peptide
  MOD_RES (5)..(5): phosphoserine
SLFGSPVAK

SEQ ID NO: 1139 - protein, 9 aa, Artificial Sequence
  Description of Artificial Sequence: Synthetic peptide
  MOD_RES (5)..(5): phosphothreonine
SLFHTPKFV

SEQ ID NO: 1140 - protein, 12 aa, Artificial Sequence
  Description of Artificial Sequence: Synthetic peptide
  MOD_RES (5)..(5): phosphoserine
SLFSSEESNLGA

SEQ ID NO: 1141 - protein, 9 aa, Artificial Sequence
  Description of Artificial Sequence: Synthetic peptide
  MOD_RES (4)..(4): phosphoserine
SLLSELQHA

SEQ ID NO: 1142 - protein, 9 aa, Artificial Sequence
  Description of Artificial Sequence: Synthetic peptide
  MOD_RES (4)..(4): phosphoserine
SLLSLSATV

SEQ ID NO: 1143 - protein, 9 aa, Artificial Sequence
  Description of Artificial Sequence: Synthetic peptide
  MOD_RES (4)..(4): phosphoserine
SLLSVSHAL

SEQ ID NO: 1144 - protein, 11 aa, Artificial Sequence
  Description of Artificial Sequence: Synthetic peptide
  MOD_RES (4)..(4): phosphothreonine
SLLTPVRLPSI

SEQ ID NO: 1145 - protein, 10 aa, Artificial Sequence
  Description of Artificial Sequence: Synthetic peptide
  MOD_RES (3)..(3): oxidized methionine
  MOD_RES (4)..(4): phosphoserine
SLMSGTLESL

SEQ ID NO: 1146 - protein, 10 aa, Artificial Sequence
  Description of Artificial Sequence: Synthetic peptide
  MOD_RES (3)..(3): oxidized methionine
  MOD_RES (6)..(6): phosphothreonine
SLMSGTLESL

SEQ ID NO: 1147 - protein, 10 aa, Artificial Sequence
  Description of Artificial Sequence: Synthetic peptide
  MOD_RES (6)..(6): phosphothreonine
SLMSGTLESL

SEQ ID NO: 1148 - protein, 9 aa, Artificial Sequence
  Description of Artificial Sequence: Synthetic peptide
  MOD_RES (4)..(4): phosphoserine
SLSSERYYL

SEQ ID NO: 1149 - protein, 11 aa, Artificial Sequence
  Description of Artificial Sequence: Synthetic peptide
  MOD_RES (3)..(3): phosphoserine
SLSSLRAHLEY

SEQ ID NO: 1150 - protein, 11 aa, Artificial Sequence
  Description of Artificial Sequence: Synthetic peptide
  MOD_RES (4)..(4): phosphoserine
SLSSLRAHLEY

SEQ ID NO: 1151 - protein, 11 aa, Artificial Sequence
  Description of Artificial Sequence: Synthetic peptide
  MOD_RES (2)..(2): oxidized methionine
  MOD_RES (4)..(4): phosphoserine
SMKSPLYLVSR

SEQ ID NO: 1152 - protein, 11 aa, Artificial Sequence
  Description of Artificial Sequence: Synthetic peptide
  MOD_RES (4)..(4): phosphoserine
SMKSPLYLVSR

SEQ ID NO: 1153 - protein, 9 aa, Artificial Sequence
  Description of Artificial Sequence: Synthetic peptide
  MOD_RES (8)..(8): phosphoserine
SPAARSLSL

SEQ ID NO: 1154 - protein, 9 aa, Artificial Sequence
  Description of Artificial Sequence: Synthetic peptide
  MOD_RES (4)..(4): phosphoserine
SPASPLKEL

SEQ ID NO: 1155 - protein, 11 aa, Artificial Sequence
  Description of Artificial Sequence: Synthetic peptide
  MOD_RES (5)..(5): phosphoserine
SPDISPPIFRR

SEQ ID NO: 1156 - protein, 8 aa, Artificial Sequence
  Description of Artificial Sequence: Synthetic peptide
  MOD_RES (8)..(8): phosphoserine
SPFKRQLS

SEQ ID NO: 1157 - protein, 9 aa, Artificial Sequence
  Description of Artificial Sequence: Synthetic peptide
  MOD_RES (8)..(8): phosphoserine
SPFLSKRSL

SEQ ID NO: 1158 - protein, 10 aa, Artificial Sequence
  Description of Artificial Sequence: Synthetic peptide
  MOD_RES (7)..(7): phosphoserine
SPFSSRSPSL

SEQ ID NO: 1159 - protein, 10 aa, Artificial Sequence
  Description of Artificial Sequence: Synthetic peptide
  MOD_RES (4)..(4): phosphoserine
SPGSPWKTKL

SEQ ID NO: 1160 - protein, 9 aa, Artificial Sequence
  Description of Artificial Sequence: Synthetic peptide
  MOD_RES (1)..(1): phosphoserine
SPHSPFYQL

SEQ ID NO: 1161 - protein, 9 aa, Artificial Sequence
  Description of Artificial Sequence: Synthetic peptide
  MOD_RES (4)..(4): phosphoserine
SPHSPFYQL

SEQ ID NO: 1162 - protein, 10 aa, Artificial Sequence
  Description of Artificial Sequence: Synthetic peptide
  MOD_RES (4)..(4): phosphoserine
SPISDEEERL

SEQ ID NO: 1163 - protein, 11 aa, Artificial Sequence
  Description of Artificial Sequence: Synthetic peptide
  MOD_RES (4)..(4): phosphoserine
SPISPRTQDAL

SEQ ID NO: 1164 - protein, 11 aa, Artificial Sequence
  Description of Artificial Sequence: Synthetic peptide
  MOD_RES (4)..(4): phosphoserine
SPISPTRQDAL

SEQ ID NO: 1165 - protein, 10 aa, Artificial Sequence
  Description of Artificial Sequence: Synthetic peptide
  MOD_RES (6)..(6): phosphoserine
SPITSSPPKW

SEQ ID NO: 1166 - protein, 9 aa, Artificial Sequence
  Description of Artificial Sequence: Synthetic peptide
  MOD_RES (6)..(6): phosphothreonine
SPKPPTRSP

SEQ ID NO: 1167 - protein, 9 aa, Artificial Sequence
  Description of Artificial Sequence: Synthetic peptide
  MOD_RES (8)..(8): phosphoserine
SPKPPTRSP

SEQ ID NO: 1168 - protein, 10 aa, Artificial Sequence
  Description of Artificial Sequence: Synthetic peptide
  MOD_RES (4)..(4): phosphoserine
SPPSPARWSL

SEQ ID NO: 1169 - protein, 8 aa, Artificial Sequence
  Description of Artificial Sequence: Synthetic peptide
  MOD_RES (6)..(6): phosphoserine
SPRAGSPF

SEQ ID NO: 1170 - protein, 17 aa, Artificial Sequence
  Description of Artificial Sequence: Synthetic peptide
  MOD_RES (6)..(6): phosphoserine
SPRAGSPFSPPPSSSSL

SEQ ID NO: 1171 - protein, 12 aa, Artificial Sequence
  Description of Artificial Sequence: Synthetic peptide
  MOD_RES (6)..(6): phosphoserine
SPRLVSRSSSVL

SEQ ID NO: 1172 - protein, 10 aa, Artificial Sequence
  Description of Artificial Sequence: Synthetic peptide
  MOD_RES (9)..(9): phosphoserine
SPRPPNSPSI

SEQ ID NO: 1173 - protein, 12 aa, Artificial Sequence
  Description of Artificial Sequence: Synthetic peptide
  MOD_RES (7)..(7): phosphoserine
SPRPPNSPSISI

SEQ ID NO: 1174 - protein, 10 aa, Artificial Sequence
  Description of Artificial Sequence: Synthetic peptide
  MOD_RES (5)..(5): phosphothreonine
SPRPTSAPAI

SEQ ID NO: 1175 - protein, 10 aa, Artificial Sequence
  Description of Artificial Sequence: Synthetic peptide
  MOD_RES (6)..(6): phosphoserine
SPRPTSAPAI

SEQ ID NO: 1176 - protein, 11 aa, Artificial Sequence
  Description of Artificial Sequence: Synthetic peptide
  MOD_RES (6)..(6): phosphoserine
SPRRPSRVSEF

SEQ ID NO: 1177 - protein, 12 aa, Artificial Sequence
  Description of Artificial Sequence: Synthetic peptide
  MOD_RES (6)..(6): phosphoserine
SPRRPSRVSEFL

SEQ ID NO: 1178 - protein, 10 aa, Artificial Sequence
  Description of Artificial Sequence: Synthetic peptide
  MOD_RES (1)..(1): phosphoserine
SPRSPISPEL

SEQ ID NO: 1179 - protein, 10 aa, Artificial Sequence
  Description of Artificial Sequence: Synthetic peptide
  MOD_RES (4)..(4): phosphoserine
SPRSPISPEL

SEQ ID NO: 1180 - protein, 10 aa, Artificial Sequence
  Description of Artificial Sequence: Synthetic peptide
  MOD_RES (1)..(1): phosphoserine
SPRSPSTTYL

SEQ ID NO: 1181 - protein, 9 aa, Artificial Sequence
  Description of Artificial Sequence: Synthetic peptide
  MOD_RES (4)..(4): phosphoserine
SPRSPTTTL

SEQ ID NO: 1182 - protein, 11 aa, Artificial Sequence
  Description of Artificial Sequence: Synthetic peptide
  MOD_RES (4)..(4): phosphoserine
SPRSPVNKTTL

SEQ ID NO: 1183 - protein, 10 aa, Artificial Sequence
  Description of Artificial Sequence: Synthetic peptide
  MOD_RES (1)..(1): phosphoserine
SPRSPVPTTL

SEQ ID NO: 1184 - protein, 10 aa, Artificial Sequence
  Description of Artificial Sequence: Synthetic peptide
  MOD_RES (4)..(4): phosphoserine
SPRSPVPTTL

SEQ ID NO: 1185 - protein, 10 aa, Artificial Sequence
  Description of Artificial Sequence: Synthetic peptide
  MOD_RES (1)..(1): phosphoserine
SPRTPPPLTV

SEQ ID NO: 1186 - protein, 10 aa, Artificial Sequence
  Description of Artificial Sequence: Synthetic peptide
  MOD_RES (4)..(4): phosphothreonine
SPRTPPPLTV

SEQ ID NO: 1187 - protein, 12 aa, Artificial Sequence
  Description of Artificial Sequence: Synthetic peptide
  MOD_RES (6)..(6): phosphothreonine
SPRTPTPFKHAL

SEQ ID NO: 1188 - protein, 11 aa, Artificial Sequence
  Description of Artificial Sequence: Synthetic peptide
  MOD_RES (4)..(4): phosphothreonine
SPRTPVSPVKF

SEQ ID NO: 1189 - protein, 9 aa, Artificial Sequence
  Description of Artificial Sequence: Synthetic peptide
  MOD_RES (3)..(3): phosphoserine
SPSPLPVAL

SEQ ID NO: 1190 - protein, 9 aa, Artificial Sequence
  Description of Artificial Sequence: Synthetic peptide
  MOD_RES (3)..(3): phosphoserine
  MOD_RES (5)..(5): oxidized methionine
SPSPMDPHM

SEQ ID NO: 1191 - protein, 9 aa, Artificial Sequence
  Description of Artificial Sequence: Synthetic peptide
  MOD_RES (3)..(3): phosphoserine
  MOD_RES (9)..(9): oxidized methionine
SPSPMDPHM

SEQ ID NO: 1192 - protein, 9 aa, Artificial Sequence
  Description of Artificial Sequence: Synthetic peptide
  MOD_RES (3)..(3): phosphoserine
SPSPMDPHM

SEQ ID NO: 1193 - protein, 9 aa, Artificial Sequence
  Description of Artificial Sequence: Synthetic peptide
  MOD_RES (3)..(3): phosphothreonine
SPTSPDYSL

SEQ ID NO: 1194 - protein, 9 aa, Artificial Sequence
  Description of Artificial Sequence: Synthetic peptide
  MOD_RES (3)..(3): phosphothreonine
SPTSPFSSL

SEQ ID NO: 1195 - protein, 9 aa, Artificial Sequence
  Description of Artificial Sequence: Synthetic peptide
  MOD_RES (4)..(4): phosphoserine
SPTSPFSSL

SEQ ID NO: 1196 - protein, 11 aa, Artificial Sequence
  Description of Artificial Sequence: Synthetic peptide
  MOD_RES (10)..(10): phosphoserine
SPVNKVRRVSF

SEQ ID NO: 1197 - protein, 10 aa, Artificial Sequence
  Description of Artificial Sequence: Synthetic peptide
  MOD_RES (4)..(4): phosphoserine
SPVSPKSLAF

SEQ ID NO: 1198 - protein, 9 aa, Artificial Sequence
  Description of Artificial Sequence: Synthetic peptide
  MOD_RES (4)..(4): phosphoserine
  MOD_RES (6)..(6): oxidized methionine
SPVSPMKEL

SEQ ID NO: 1199 - protein, 8 aa, Artificial Sequence
  Description of Artificial Sequence: Synthetic peptide
  MOD_RES (4)..(4): phosphoserine
  MOD_RES (8)..(8): oxidized methionine
SQDSPIFM

SEQ ID NO: 1200 - protein, 8 aa, Artificial Sequence
  Description of Artificial Sequence: Synthetic peptide
  MOD_RES (4)..(4): phosphoserine
SQDSPIFM

SEQ ID NO: 1201 - protein, 9 aa, Artificial Sequence
  Description of Artificial Sequence: Synthetic peptide
  MOD_RES (8)..(8): phosphoserine
SQILRTPSL

SEQ ID NO: 1202 - protein, 10 aa, Artificial Sequence
  Description of Artificial Sequence: Synthetic peptide
  MOD_RES (5)..(5): phosphoserine
SRFHSPSTTW

SEQ ID NO: 1203 - protein, 9 aa, Artificial Sequence
  Description of Artificial Sequence: Synthetic peptide
  MOD_RES (4)..(4): phosphoserine
SRFSGGFGA

SEQ ID NO: 1204 - protein, 12 aa, Artificial Sequence
  Description of Artificial Sequence: Synthetic peptide
  MOD_RES (4)..(4): phosphoserine
SRFSGGFGARDY

SEQ ID NO: 1205 - protein, 10 aa, Artificial Sequence
  Description of Artificial Sequence: Synthetic peptide
  MOD_RES (4)..(4): phosphoserine
SRHSGPFFTF

SEQ ID NO: 1206 - protein, 11 aa, Artificial Sequence
  Description of Artificial Sequence: Synthetic peptide
  MOD_RES (5)..(5): phosphoserine
SRKESYSVYVY

SEQ ID NO: 1207 - protein, 9 aa, Artificial Sequence
  Description of Artificial Sequence: Synthetic peptide
  MOD_RES (4)..(4): phosphoserine
SRKSFVFEL

SEQ ID NO: 1208 - protein, 7 aa, Artificial Sequence
  Description of Artificial Sequence: Synthetic peptide
  MOD_RES (4)..(4): phosphoserine
SRLSLRR

SEQ ID NO: 1209 - protein, 9 aa, Artificial Sequence
  Description of Artificial Sequence: Synthetic peptide
  MOD_RES (4)..(4): phosphoserine
SRLSLRRSL

SEQ ID NO: 1210 - protein, 10 aa, Artificial Sequence
  Description of Artificial Sequence: Synthetic peptide
  MOD_RES (5)..(5): oxidized methionine
  MOD_RES (6)..(6): phosphoserine
SRPSMSPTPL

SEQ ID NO: 1211 - protein, 10 aa, Artificial Sequence
  Description of Artificial Sequence: Synthetic peptide
  MOD_RES (6)..(6): phosphoserine
SRPSMSPTPL

SEQ ID NO: 1212 - protein, 9 aa, Artificial Sequence
  Description of Artificial Sequence: Synthetic peptide
  MOD_RES (4)..(4): phosphoserine
SRRSIFEMY

SEQ ID NO: 1213 - protein, 8 aa, Artificial Sequence
  Description of Artificial Sequence: Synthetic peptide
  MOD_RES (4)..(4): phosphoserine
SRSSPLKL

SEQ ID NO: 1214 - protein, 11 aa, Artificial Sequence
  Description of Artificial Sequence: Synthetic peptide
  MOD_RES (4)..(4): phosphoserine
SSISPSTLTLK

SEQ ID NO: 1215 - protein, 11 aa, Artificial Sequence
  Description of Artificial Sequence: Synthetic peptide
  MOD_RES (4)..(4): phosphoserine
SSLSGEELVTK

SEQ ID NO: 1216 - protein, 10 aa, Artificial Sequence
  Description of Artificial Sequence: Synthetic peptide
  MOD_RES (5)..(5): phosphoserine
SSLSSPLNPK

SEQ ID NO: 1217 - protein, 9 aa, Artificial Sequence
  Description of Artificial Sequence: Synthetic peptide
  MOD_RES (4)..(4): phosphoserine
SSSSPFKFK

SEQ ID NO: 1218 - protein, 12 aa, Artificial Sequence
  Description of Artificial Sequence: Synthetic peptide
  MOD_RES (4)..(4): phosphoserine
STASAITPSVSR

SEQ ID NO: 1219 - protein, 10 aa, Artificial Sequence
  Description of Artificial Sequence: Synthetic peptide
  MOD_RES (9)..(9): phosphoserine
STGGGTVISR

SEQ ID NO: 1220 - protein, 9 aa, Artificial Sequence
  Description of Artificial Sequence: Synthetic peptide
  MOD_RES (3)..(3): phosphoserine
STSLEKNNV

SEQ ID NO: 1221 - protein, 10 aa, Artificial Sequence
  Description of Artificial Sequence: Synthetic peptide
  MOD_RES (4)..(4): phosphoserine
SVFSPSFGLK

SEQ ID NO: 1222 - protein, 9 aa, Artificial Sequence
  Description of Artificial Sequence: Synthetic peptide
  MOD_RES (4)..(4): phosphoserine
SVISDDSVL

SEQ ID NO: 1223 - protein, 9 aa, Artificial Sequence
  Description of Artificial Sequence: Synthetic peptide
  MOD_RES (4)..(4): phosphoserine
SVISGISSR

SEQ ID NO: 1224 - protein, 9 aa, Artificial Sequence
  Description of Artificial Sequence: Synthetic peptide
  MOD_RES (5)..(5): phosphoserine
SVISSPLLK

SEQ ID NO: 1225 - protein, 9 aa, Artificial Sequence
  Description of Artificial Sequence: Synthetic peptide
  MOD_RES (4)..(4): phosphoserine
SVLSPLLNK

SEQ ID NO: 1226 - protein, 10 aa, Artificial Sequence
  Description of Artificial Sequence: Synthetic peptide
  MOD_RES (4)..(4): phosphoserine
SVLSPTSWEK

SEQ ID NO: 1227 - protein, 9 aa, Artificial Sequence
  Description of Artificial Sequence: Synthetic peptide
  MOD_RES (4)..(4): phosphoserine
SVLSYTSVR

SEQ ID NO: 1228 - protein, 9 aa, Artificial Sequence
  Description of Artificial Sequence: Synthetic peptide
  MOD_RES (4)..(4): phosphothreonine
SVLTPLLLR

SEQ ID NO: 1229 - protein, 12 aa, Artificial Sequence
  Description of Artificial Sequence: Synthetic peptide
  MOD_RES (8)..(8): phosphoserine
SVPEFPLSPPKK

SEQ ID NO: 1230 - protein, 11 aa, Artificial Sequence
  Description of Artificial Sequence: Synthetic peptide
  MOD_RES (4)..(4): phosphoserine
SVQSDQGYISR

SEQ ID NO: 1231 - protein, 9 aa, Artificial Sequence
  Description of Artificial Sequence: Synthetic peptide
  MOD_RES (4)..(4): phosphoserine
SVSSLEVHF

SEQ ID NO: 1232 - protein, 9 aa, Artificial Sequence
  Description of Artificial Sequence: Synthetic peptide
  MOD_RES (4)..(4): phosphoserine
  MOD_RES (8)..(8): oxidized methionine
SVTSPIKMK

SEQ ID NO: 1233 - protein, 9 aa, Artificial Sequence
  Description of Artificial Sequence: Synthetic peptide
  MOD_RES (4)..(4): phosphoserine
SVTSPIKMK

SEQ ID NO: 1234 - protein, 12 aa, Artificial Sequence
  Description of Artificial Sequence: Synthetic peptide
  MOD_RES (4)..(4): phosphoserine
SVVSFDKVKEPR

SEQ ID NO: 1235 - protein, 12 aa, Artificial Sequence
  Description of Artificial Sequence: Synthetic peptide
  MOD_RES (4)..(4): phosphoserine
SVVSGSEMSGKY

SEQ ID NO: 1236 - protein, 11 aa, Artificial Sequence
  Description of Artificial Sequence: Synthetic peptide
  MOD_RES (4)..(4): phosphoserine
SVYSPSGPVNR

SEQ ID NO: 1237 - protein, 11 aa, Artificial Sequence
  Description of Artificial Sequence: Synthetic peptide
  MOD_RES (6)..(6): phosphoserine
SVYSPSGPVNR

SEQ ID NO: 1238 - protein, 10 aa, Artificial Sequence
  Description of Artificial Sequence: Synthetic peptide
  MOD_RES (4)..(4): phosphoserine
SYPSPVPTSF

SEQ ID NO: 1239 - protein, 13 aa, Artificial Sequence
  Description of Artificial Sequence: Synthetic peptide
  MOD_RES (11)..(11): phosphoserine
SYVTTSTRTYSLG

SEQ ID NO: 1240 - protein, 11 aa, Artificial Sequence
  Description of Artificial Sequence: Synthetic peptide
  MOD_RES (4)..(4): phosphoserine
SYYSPSIGFSY

SEQ ID NO: 1241 - protein, 9 aa, Artificial Sequence
  Description of Artificial Sequence: Synthetic peptide
  MOD_RES (4)..(4): phosphoserine
TAISPPLSV

SEQ ID NO: 1242 - protein, 9 aa, Artificial Sequence
  Description of Artificial Sequence: Synthetic peptide
  MOD_RES (8)..(8): phosphoserine
TELPKRLSL

SEQ ID NO: 1243 - protein, 13 aa, Artificial Sequence
  Description of Artificial Sequence: Synthetic peptide
  MOD_RES (4)..(4): phosphoserine
  MOD_RES (13)..(13): oxidized tryptophan
TESSPGSRQIQLW

SEQ ID NO: 1244 - protein, 13 aa, Artificial Sequence
  Description of Artificial Sequence: Synthetic peptide
  MOD_RES (4)..(4): phosphoserine
TESSPGSRQIQLW

SEQ ID NO: 1245 - protein, 9 aa, Artificial Sequence
  Description of Artificial Sequence: Synthetic peptide
  MOD_RES (4)..(4): phosphoserine
TEVSPSRTI

SEQ ID NO: 1246 - protein, 10 aa, Artificial Sequence
  Description of Artificial Sequence: Synthetic peptide
  MOD_RES (7)..(7): phosphoserine
THALPESPRL

SEQ ID NO: 1247 - protein, 8 aa, Artificial Sequence
  Description of Artificial Sequence: Synthetic peptide
  MOD_RES (4)..(4): phosphoserine
  MOD_RES (7)..(7): cysteinylated cysteine
THDSPFCL

SEQ ID NO: 1248 - protein, 9 aa, Artificial Sequence
  Description of Artificial Sequence: Synthetic peptide
  MOD_RES (4)..(4): phosphoserine
THISPNAIF

SEQ ID NO: 1249 - protein, 11 aa, Artificial Sequence
  Description of Artificial Sequence: Synthetic peptide
  MOD_RES (4)..(4): phosphoserine
THISPNAIFKA

SEQ ID NO: 1250 - protein, 10 aa, Artificial Sequence
  Description of Artificial Sequence: Synthetic peptide
  MOD_RES (4)..(4): phosphoserine
TIFSPEGRLY

SEQ ID NO: 1251 - protein, 9 aa, Artificial Sequence
  Description of Artificial Sequence: Synthetic peptide
  MOD_RES (3)..(3): oxidized methionine
  MOD_RES (4)..(4): phosphoserine
TIMSPAVLK

SEQ ID NO: 1252 - protein, 9 aa, Artificial Sequence
  Description of Artificial Sequence: Synthetic peptide
  MOD_RES (4)..(4): phosphoserine
TIMSPAVLK

SEQ ID NO: 1253 - protein, 9 aa, Artificial Sequence
  Description of Artificial Sequence: Synthetic peptide
  MOD_RES (6)..(6): phosphothreonine
TIRSPTTVL

SEQ ID NO: 1254 - protein, 9 aa, Artificial Sequence
  Description of Artificial Sequence: Synthetic peptide
  MOD_RES (4)..(4): phosphoserine
TLASPSVFK

SEQ ID NO: 1255 - protein, 9 aa, Artificial Sequence
  Description of Artificial Sequence: Synthetic peptide
  MOD_RES (5)..(5): phosphoserine
  MOD_RES (7)..(7): oxidized methionine
TLLASPMLK

SEQ ID NO: 1256 - protein, 11 aa, Artificial Sequence
  Description of Artificial Sequence: Synthetic peptide
  MOD_RES (4)..(4): phosphoserine
TLLSAAHEVEL

SEQ ID NO: 1257 - protein, 9 aa, Artificial Sequence
  Description of Artificial Sequence: Synthetic peptide
  MOD_RES (4)..(4): phosphoserine
TLLSPKHKY

SEQ ID NO: 1258 - protein, 11 aa, Artificial Sequence
  Description of Artificial Sequence: Synthetic peptide
  MOD_RES (4)..(4): phosphoserine
TLPSPDKLPGF

SEQ ID NO: 1259 - protein, 10 aa, Artificial Sequence
  Description of Artificial Sequence: Synthetic peptide
  MOD_RES (7)..(7): phosphothreonine
TLSCPVTEVI

SEQ ID NO: 1260 - protein, 9 aa, Artificial Sequence
  Description of Artificial Sequence: Synthetic peptide
  MOD_RES (3)..(3): phosphoserine
TLSSIRHMI

SEQ ID NO: 1261 - protein, 9 aa, Artificial Sequence
  Description of Artificial Sequence: Synthetic peptide
  MOD_RES (4)..(4): phosphoserine
  MOD_RES (8)..(8): oxidized methionine
TLSSIRHMI

SEQ ID NO: 1262 - protein, 9 aa, Artificial Sequence
  Description of Artificial Sequence: Synthetic peptide
  MOD_RES (4)..(4): phosphoserine
TLSSIRHMI

SEQ ID NO: 1263 - protein, 9 aa, Artificial Sequence
  Description of Artificial Sequence: Synthetic peptide
  MOD_RES (8)..(8): phosphoserine
TLYPRSFSV

SEQ ID NO: 1264 - protein, 9 aa, Artificial Sequence
  Description of Artificial Sequence: Synthetic peptide
  MOD_RES (2)..(2): oxidized methionine
  MOD_RES (8)..(8): phosphoserine
TMFLRETSL

SEQ ID NO: 1265 - protein, 9 aa, Artificial Sequence
  Description of Artificial Sequence: Synthetic peptide
  MOD_RES (7)..(7): phosphothreonine
TMFLRETSL

SEQ ID NO: 1266 - protein, 9 aa, Artificial Sequence
  Description of Artificial Sequence: Synthetic peptide
  MOD_RES (8)..(8): phosphoserine
TMFLRETSL

SEQ ID NO: 1267 - protein, 12 aa, Artificial Sequence
  Description of Artificial Sequence: Synthetic peptide
  MOD_RES (2)..(2): oxidized methionine
  MOD_RES (4)..(4): phosphoserine
TMLSPREKIFYY

SEQ ID NO: 1268 - protein, 12 aa, Artificial Sequence
  Description of Artificial Sequence: Synthetic peptide
  MOD_RES (4)..(4): phosphoserine
TMLSPREKIFYY

SEQ ID NO: 1269 - protein, 16 aa, Artificial Sequence
  Description of Artificial Sequence: Synthetic peptide
  MOD_RES (9)..(9): phosphoserine
TPAGSARGSPTRPNPP

SEQ ID NO: 1270 - protein, 9 aa, Artificial Sequence
  Description of Artificial Sequence: Synthetic peptide
  MOD_RES (4)..(4): phosphothreonine
TPHTPKSLL

SEQ ID NO: 1271 - protein, 14 aa, Artificial Sequence
  Description of Artificial Sequence: Synthetic peptide
  MOD_RES (4)..(4): phosphoserine
  MOD_RES (11)..(11): oxidized methionine
TPISPGRASGMTTL

SEQ ID NO: 1272 - protein, 14 aa, Artificial Sequence
  Description of Artificial Sequence: Synthetic peptide
  MOD_RES (4)..(4): phosphoserine
TPISPGRASGMTTL

SEQ ID NO: 1273 - protein, 12 aa, Artificial Sequence
  Description of Artificial Sequence: Synthetic peptide
  MOD_RES (1)..(1): phosphothreonine
TPPSSEKLVSVM

SEQ ID NO: 1274 - protein, 10 aa, Artificial Sequence
  Description of Artificial Sequence: Synthetic peptide
  MOD_RES (5)..(5): phosphoserine
TPQPSKDTLL

SEQ ID NO: 1275 - protein, 9 aa, Artificial Sequence
  Description of Artificial Sequence: Synthetic peptide
  MOD_RES (3)..(3): phosphoserine
TPSPARPAL

SEQ ID NO: 1276 - protein, 8 aa, Artificial Sequence
  Description of Artificial Sequence: Synthetic peptide
  MOD_RES (4)..(4): phosphoserine
TPVSPVKF

SEQ ID NO: 1277 - protein, 9 aa, Artificial Sequence
  Description of Artificial Sequence: Synthetic peptide
  MOD_RES (6)..(6): phosphoserine
TQRKFSLQF

SEQ ID NO: 1278 - protein, 9 aa, Artificial Sequence
  Description of Artificial Sequence: Synthetic peptide
  MOD_RES (4)..(4): phosphoserine
TRDSLLIHL

SEQ ID NO: 1279 - protein, 9 aa, Artificial Sequence
  Description of Artificial Sequence: Synthetic peptide
  MOD_RES (4)..(4): phosphothreonine
TSETPQPPR

SEQ ID NO: 1280 - protein, 9 aa, Artificial Sequence
  Description of Artificial Sequence: Synthetic peptide
  MOD_RES (4)..(4): phosphoserine
TSISPALAR

SEQ ID NO: 1281 - protein, 12 aa, Artificial Sequence
  Description of Artificial Sequence: Synthetic peptide
  MOD_RES (5)..(5): phosphoserine
TSVGSPSNTIGR

SEQ ID NO: 1282 - protein, 12 aa, Artificial Sequence
  Description of Artificial Sequence: Synthetic peptide
  MOD_RES (11)..(11): phosphoserine
TSYNSISSVVSR

SEQ ID NO: 1283 - protein, 13 aa, Artificial Sequence
  Description of Artificial Sequence: Synthetic peptide
  MOD_RES (9)..(9): phosphoserine
TTEVIRKGSITEY

SEQ ID NO: 1284 - protein, 9 aa, Artificial Sequence
  Description of Artificial Sequence: Synthetic peptide
  MOD_RES (1)..(1): phosphothreonine
TTGSPTEFL

SEQ ID NO: 1285 - protein, 9 aa, Artificial Sequence
  Description of Artificial Sequence: Synthetic peptide
  MOD_RES (2)..(2): phosphothreonine
TTGSPTEFL

SEQ ID NO: 1286 - protein, 9 aa, Artificial Sequence
  Description of Artificial Sequence: Synthetic peptide
  MOD_RES (4)..(4): phosphoserine
TTGSPTEFL

SEQ ID NO: 1287 - protein, 10 aa, Artificial Sequence
  Description of Artificial Sequence: Synthetic peptide
  MOD_RES (4)..(4): phosphoserine
TVFSPDGHLF

SEQ ID NO: 1288 - protein, 10 aa, Artificial Sequence
  Description of Artificial Sequence: Synthetic peptide
  MOD_RES (6)..(6): phosphothreonine
TVFSPTLPAA

SEQ ID NO: 1289 - protein, 11 aa, Artificial Sequence
  Description of Artificial Sequence: Synthetic peptide
  MOD_RES (4)..(4): phosphoserine
TVFSPTLPAAR

SEQ ID NO: 1290 - protein, 9 aa, Artificial Sequence
  Description of Artificial Sequence: Synthetic peptide
  MOD_RES (4)..(4): phosphothreonine
TVFTPVEEK

SEQ ID NO: 1291 - protein, 9 aa, Artificial Sequence
  Description of Artificial Sequence: Synthetic peptide
  MOD_RES (8)..(8): phosphoserine
TVKQKYLSF

SEQ ID NO: 1292 - protein, 9 aa, Artificial Sequence
  Description of Artificial Sequence: Synthetic peptide
  MOD_RES (4)..(4): phosphoserine
TVNSPAIYK

SEQ ID NO: 1293 - protein, 10 aa, Artificial Sequence
  Description of Artificial Sequence: Synthetic peptide
  MOD_RES (4)..(4): phosphoserine
TVNSPAIYKF

SEQ ID NO: 1294 - protein, 11 aa, Artificial Sequence
  Description of Artificial Sequence: Synthetic peptide
  MOD_RES (4)..(4): phosphothreonine
TVSTPPPFQGR

SEQ ID NO: 1295 - protein, 9 aa, Artificial Sequence
  Description of Artificial Sequence: Synthetic peptide
  MOD_RES (3)..(3): phosphoserine
TVSTVGISI

SEQ ID NO: 1296 - protein, 10 aa, Artificial Sequence
  Description of Artificial Sequence: Synthetic peptide
  MOD_RES (4)..(4): phosphoserine
TVVSPRALEL

SEQ ID NO: 1297 - protein, 12 aa, Artificial Sequence
  Description of Artificial Sequence: Synthetic peptide
  MOD_RES (5)..(5): phosphoserine
TVYSSEEAELLK

SEQ ID NO: 1298 - protein, 10 aa, Artificial Sequence
  Description of Artificial Sequence: Synthetic peptide
  MOD_RES (9)..(9): phosphoserine
TYDDRAYSSF

SEQ ID NO: 1299 - protein, 10 aa, Artificial Sequence
  Description of Artificial Sequence: Synthetic peptide
  MOD_RES (4)..(4): phosphoserine
TYVSSFYHAF

SEQ ID NO: 1300 - protein, 11 aa, Artificial Sequence
  Description of Artificial Sequence: Synthetic peptide
  MOD_RES (6)..(6): phosphoserine
VAKRNSLKELW

SEQ ID NO: 1301 - protein, 9 aa, Artificial Sequence
  Description of Artificial Sequence: Synthetic peptide
  MOD_RES (4)..(4): phosphoserine
VARSPLKEF

SEQ ID NO: 1302 - protein, 9 aa, Artificial Sequence
  Description of Artificial Sequence: Synthetic peptide
  MOD_RES (4)..(4): phosphoserine
VEHSPFSSF

SEQ ID NO: 1303 - protein, 9 aa, Artificial Sequence
  Description of Artificial Sequence: Synthetic peptide
  MOD_RES (4)..(4): phosphoserine
  MOD_RES (9)..(9): oxidized tryptophan
VELSPARSW

SEQ ID NO: 1304 - protein, 9 aa, Artificial Sequence
  Description of Artificial Sequence: Synthetic peptide
  MOD_RES (4)..(4): phosphoserine
VELSPARSW

SEQ ID NO: 1305 - protein, 12 aa, Artificial Sequence
  Description of Artificial Sequence: Synthetic peptide
  MOD_RES (4)..(4): phosphoserine
VELSPLKGSVSW

SEQ ID NO: 1306 - protein, 10 aa, Artificial Sequence
  Description of Artificial Sequence: Synthetic peptide
  MOD_RES (4)..(4): phosphoserine
VETSFRKLSF

SEQ ID NO: 1307 - protein, 10 aa, Artificial Sequence
  Description of Artificial Sequence: Synthetic peptide
  MOD_RES (9)..(9): phosphoserine
VETSFRKLSF

SEQ ID NO: 1308 - protein, 9 aa, Artificial Sequence
  Description of Artificial Sequence: Synthetic peptide
  MOD_RES (4)..(4): phosphoserine
VIDSQELSK

SEQ ID NO: 1309 - protein, 9 aa, Artificial Sequence
  Description of Artificial Sequence: Synthetic peptide
  MOD_RES (4)..(4): phosphoserine
VIKSPSWQR

SEQ ID NO: 1310 - protein, 9 aa, Artificial Sequence
  Description of Artificial Sequence: Synthetic peptide
  MOD_RES (3)..(3): oxidized methionine
  MOD_RES (4)..(4): phosphoserine
VIMSIRTKL

SEQ ID NO: 1311 - protein, 9 aa, Artificial Sequence
  Description of Artificial Sequence: Synthetic peptide
  MOD_RES (4)..(4): phosphoserine
VIMSIRTKL

SEQ ID NO: 1312 - protein, 10 aa, Artificial Sequence
  Description of Artificial Sequence: Synthetic peptide
  MOD_RES (4)..(4): phosphoserine
VLASPLKTGR

SEQ ID NO: 1313 - protein, 9 aa, Artificial Sequence
  Description of Artificial Sequence: Synthetic peptide
  MOD_RES (5)..(5): phosphoserine
  MOD_RES (9)..(9): oxidized methionine
VLFSSPPQM

SEQ ID NO: 1314 - protein, 11 aa, Artificial Sequence
  Description of Artificial Sequence: Synthetic peptide
  MOD_RES (4)..(4): phosphoserine
VLGSQEALHPV

SEQ ID NO: 1315 - protein, 9 aa, Artificial Sequence
  Description of Artificial Sequence: Synthetic peptide
  MOD_RES (8)..(8): phosphoserine
VLPSQVYSL

SEQ ID NO: 1316 - protein, 8 aa, Artificial Sequence
  Description of Artificial Sequence: Synthetic peptide
  MOD_RES (2)..(2): oxidized methionine
  MOD_RES (4)..(4): phosphoserine
VMDSPVHL

SEQ ID NO: 1317 - protein, 10 aa, Artificial Sequence
  Description of Artificial Sequence: Synthetic peptide
  MOD_RES (2)..(2): oxidized methionine
  MOD_RES (5)..(5): phosphothreonine
VMFRTPLASV

SEQ ID NO: 1318 - protein, 10 aa, Artificial Sequence
  Description of Artificial Sequence: Synthetic peptide
  MOD_RES (7)..(7): phosphoserine
VPFKRLSVVF

SEQ ID NO: 1319 - protein, 12 aa, Artificial Sequence
  Description of Artificial Sequence: Synthetic peptide
  MOD_RES (8)..(8): phosphoserine
VPKGPIHSPVEL

SEQ ID NO: 1320 - protein, 9 aa, Artificial Sequence
  Description of Artificial Sequence: Synthetic peptide
  MOD_RES (8)..(8): phosphoserine
VPKKPPPSP

SEQ ID NO: 1321 - protein, 9 aa, Artificial Sequence
  Description of Artificial Sequence: Synthetic peptide
  MOD_RES (8)..(8): phosphoserine
VPNEEDPSL

SEQ ID NO: 1322 - protein, 11 aa, Artificial Sequence
  Description of Artificial Sequence: Synthetic peptide
  MOD_RES (4)..(4): phosphoserine
VPRSPFKVKVL

SEQ ID NO: 1323 - protein, 9 aa, Artificial Sequence
  Description of Artificial Sequence: Synthetic peptide
  MOD_RES (4)..(4): phosphoserine
VPRSPVIKI

SEQ ID NO: 1324 - protein, 9 aa, Artificial Sequence
  Description of Artificial Sequence: Synthetic peptide
  MOD_RES (4)..(4): phosphothreonine
VPRTPVGKF

SEQ ID NO: 1325 - protein, 9 aa, Artificial Sequence
  Description of Artificial Sequence: Synthetic peptide
  MOD_RES (4)..(4): phosphoserine
VPSSPLRKA

SEQ ID NO: 1326 - protein, 10 aa, Artificial Sequence
  Description of Artificial Sequence: Synthetic peptide
  MOD_RES (4)..(4): phosphoserine
VPTSPKGRLL

SEQ ID NO: 1327 - protein, 9 aa, Artificial Sequence
  Description of Artificial Sequence: Synthetic peptide
  MOD_RES (4)..(4): phosphoserine
VRKSRAWVL

SEQ ID NO: 1328 - protein, 9 aa, Artificial Sequence
  Description of Artificial Sequence: Synthetic peptide
  MOD_RES (8)..(8): phosphoserine
VRTPSVQSL

SEQ ID NO: 1329 - protein, 10 aa, Artificial Sequence
  Description of Artificial Sequence: Synthetic peptide
  MOD_RES (4)..(4): phosphoserine
VSFSPTDHSL

SEQ ID NO: 1330 - protein, 9 aa, Artificial Sequence
  Description of Artificial Sequence: Synthetic peptide
  MOD_RES (4)..(4): phosphoserine
VSSSPRELL

SEQ ID NO: 1331 - protein, 10 aa, Artificial Sequence
  Description of Artificial Sequence: Synthetic peptide
  MOD_RES (4)..(4): phosphoserine
VVSSPKLAPK

SEQ ID NO: 1332 - protein, 12 aa, Artificial Sequence
  Description of Artificial Sequence: Synthetic peptide
  MOD_RES (5)..(5): oxidized methionine
  MOD_RES (6)..(6): phosphoserine
VYIPMSPGAHHF

SEQ ID NO: 1333 - protein, 12 aa, Artificial Sequence
  Description of Artificial Sequence: Synthetic peptide
  MOD_RES (6)..(6): phosphoserine
VYIPMSPGAHHF

SEQ ID NO: 1334 - protein, 9 aa, Artificial Sequence
  Description of Artificial Sequence: Synthetic peptide
  MOD_RES (7)..(7): phosphothreonine
VYLPTHTSL

SEQ ID NO: 1335 - protein, 9 aa, Artificial Sequence
  Description of Artificial Sequence: Synthetic peptide
  MOD_RES (8)..(8): phosphoserine
VYLPTHTSL

SEQ ID NO: 1336 - protein, 10 aa, Artificial Sequence
  Description of Artificial Sequence: Synthetic peptide
  MOD_RES (7)..(7): phosphothreonine
VYLPTHTSLL

SEQ ID NO: 1337 - protein, 10 aa, Artificial Sequence
  Description of Artificial Sequence: Synthetic peptide
  MOD_RES (8)..(8): phosphoserine
VYLPTHTSLL

SEQ ID NO: 1338 - protein, 9 aa, Artificial Sequence
  Description of Artificial Sequence: Synthetic peptide
  MOD_RES (4)..(4): phosphoserine
VYTSVQAQY

SEQ ID NO: 1339 - protein, 11 aa, Artificial Sequence
  Description of Artificial Sequence: Synthetic peptide
  MOD_RES (7)..(7): phosphothreonine
WEDRPSTPTIL

SEQ ID NO: 1340 - protein, 9 aa, Artificial Sequence
  Description of Artificial Sequence: Synthetic peptide
  MOD_RES (8)..(8): phosphoserine
WEFGKRDSL

SEQ ID NO: 1341 - protein, 10 aa, Artificial Sequence
  Description of Artificial Sequence: Synthetic peptide
  MOD_RES (4)..(4): phosphoserine
WPRSPGRAFL

SEQ ID NO: 1342 - protein, 10 aa, Artificial Sequence
  Description of Artificial Sequence: Synthetic peptide
  MOD_RES (5)..(5): phosphoserine
WVIGSPEILR

SEQ ID NO: 1343 - protein, 9 aa, Artificial Sequence
  Description of Artificial Sequence: Synthetic peptide
  MOD_RES (4)..(4): phosphoserine
YAFSPKIGR

SEQ ID NO: 1344 - protein, 9 aa, Artificial Sequence
  Description of Artificial Sequence: Synthetic peptide
  MOD_RES (1)..(1): phosphotyrosine
YEKIHLDFL

SEQ ID NO: 1345 - protein, 10 aa, Artificial Sequence
  Description of Artificial Sequence: Synthetic peptide
  MOD_RES (7)..(7): phosphoserine
YEVEPYSPGL

SEQ ID NO: 1346 - protein, 9 aa, Artificial Sequence
  Description of Artificial Sequence: Synthetic peptide
  MOD_RES (4)..(4): phosphoserine
YHLSPRAFL

SEQ ID NO: 1347 - protein, 10 aa, Artificial Sequence
  Description of Artificial Sequence: Synthetic peptide
  MOD_RES (6)..(6): phosphoserine
YILDSSPEKL

SEQ ID NO: 1348 - protein, 11 aa, Artificial Sequence
  Description of Artificial Sequence: Synthetic peptide
  MOD_RES (4)..(4): phosphoserine
YLRSVGDGETV

SEQ ID NO: 1349 - protein, 11 aa, Artificial Sequence
  Description of Artificial Sequence: Synthetic peptide
  MOD_RES (4)..(4): phosphoserine
YLVSPITGEKI

SEQ ID NO: 1350 - protein, 9 aa, Artificial Sequence
  Description of Artificial Sequence: Synthetic peptide
  MOD_RES (6)..(6): phosphoserine
YPDPHSPFA

SEQ ID NO: 1351 - protein, 12 aa, Artificial Sequence
  Description of Artificial Sequence: Synthetic peptide
  MOD_RES (6)..(6): phosphoserine
YPFLDSPNKYSL

SEQ ID NO: 1352 - protein, 9 aa, Artificial Sequence
  Description of Artificial Sequence: Synthetic peptide
  MOD_RES (8)..(8): phosphoserine
YPSFRRSSL

SEQ ID NO: 1353 - protein, 9 aa, Artificial Sequence
  Description of Artificial Sequence: Synthetic peptide
  MOD_RES (3)..(3): phosphothreonine
YPTPYPDEL

SEQ ID NO: 1354 - protein, 12 aa, Artificial Sequence
  Description of Artificial Sequence: Synthetic peptide
  MOD_RES (4)..(4): phosphoserine
YQLSPTKLPSIN

SEQ ID NO: 1355 - protein, 10 aa, Artificial Sequence
  Description of Artificial Sequence: Synthetic peptide
  MOD_RES (8)..(8): phosphoserine
YQRPFSPSAY

SEQ ID NO: 1356 - protein, 10 aa, Artificial Sequence
  Description of Artificial Sequence: Synthetic peptide
  MOD_RES (4)..(4): phosphoserine
YQYSDQGIDY

SEQ ID NO: 1357 - protein, 10 aa, Artificial Sequence
  Description of Artificial Sequence: Synthetic peptide
  MOD_RES (4)..(4): phosphoserine
YRLSPEPTPL

SEQ ID NO: 1358 - protein, 9 aa, Artificial Sequence
  Description of Artificial Sequence: Synthetic peptide
  MOD_RES (4)..(4): phosphoserine
YRPSYSYDY

SEQ ID NO: 1359 - protein, 12 aa, Artificial Sequence
  Description of Artificial Sequence: Synthetic peptide
  MOD_RES (4)..(4): phosphoserine
YRPSYSYDYEFD

SEQ ID NO: 1360 - protein, 10 aa, Artificial Sequence
  Description of Artificial Sequence: Synthetic peptide
  MOD_RES (9)..(9): phosphoserine
YRYDGQHFSL

SEQ ID NO: 1361 - protein, 9 aa, Artificial Sequence
  Description of Artificial Sequence: Synthetic peptide
  MOD_RES (4)..(4): phosphoserine
YRYSLEKAL

SEQ ID NO: 1362 - protein, 13 aa, Artificial Sequence
  Description of Artificial Sequence: Synthetic peptide
  MOD_RES (5)..(5): phosphoserine
  MOD_RES (11)..(11): oxidized methionine
YSLDSPGPEKMAL

SEQ ID NO: 1363 - protein, 13 aa, Artificial Sequence
  Description of Artificial Sequence: Synthetic peptide
  MOD_RES (5)..(5): phosphoserine
YSLDSPGPEKMAL

SEQ ID NO: 1364 - protein, 11 aa, Artificial Sequence
  Description of Artificial Sequence: Synthetic peptide
  MOD_RES (4)..(4): phosphoserine
YSLSPSKSYKY

SEQ ID NO: 1365 - protein, 9 aa, Artificial Sequence
  Description of Artificial Sequence: Synthetic peptide
  MOD_RES (3)..(3): oxidized methionine
  MOD_RES (4)..(4): phosphoserine
YSMSPGAMR

SEQ ID NO: 1366 - protein, 9 aa, Artificial Sequence
  Description of Artificial Sequence: Synthetic peptide
  MOD_RES (4)..(4): phosphoserine
  MOD_RES (8)..(8): oxidized methionine
YSMSPGAMR

SEQ ID NO: 1367 - protein, 9 aa, Artificial Sequence
  Description of Artificial Sequence: Synthetic peptide
  MOD_RES (4)..(4): phosphoserine
YSMSPGAMR

SEQ ID NO: 1368 - protein, 9 aa, Artificial Sequence
  Description of Artificial Sequence: Synthetic peptide
  MOD_RES (8)..(8): phosphoserine
YVKLTPVSL

SEQ ID NO: 1369 - protein, 9 aa, Artificial Sequence
  Description of Artificial Sequence: Synthetic peptide
  MOD_RES (4)..(4): phosphoserine
YVSSPDPQL

SEQ ID NO: 1370 - protein, 10 aa, Artificial Sequence
  Description of Artificial Sequence: Synthetic peptide
  MOD_RES (4)..(4): phosphoserine
YYFSPSGKKF

SEQ ID NO: 1371 - protein, 9 aa, Artificial Sequence
  Description of Artificial Sequence: Synthetic peptide
  MOD_RES (1)..(1): phosphotyrosine
YYISPRITF

SEQ ID NO: 1372 - protein, 22 aa, Artificial Sequence
  Description of Artificial Sequence: Synthetic peptide
  MOD_RES (7)..(7): phosphoserine
AELGRLSPRAYFFRKNLLRLTG

SEQ ID NO: 1373 - protein, 20 aa, Artificial Sequence
  Description of Artificial Sequence: Synthetic peptide
  MOD_RES (5)..(5): oxidized methionine
  MOD_RES (6)..(6): phosphoserine
AESIMSFHIFFRKNLLRLTG

SEQ ID NO: 1374 - protein, 20 aa, Artificial Sequence
  Description of Artificial Sequence: Synthetic peptide
  MOD_RES (6)..(6): phosphoserine
AESIMSFHIFFRKNLLRLTG

SEQ ID NO: 1375 - protein, 22 aa, Artificial Sequence
  Description of Artificial Sequence: Synthetic peptide
  MOD_RES (3)..(3): phosphoserine
AESLKSLSSELFFRKNLLRLTG

SEQ ID NO: 1376 - protein, 20 aa, Artificial Sequence
  Description of Artificial Sequence: Synthetic peptide
  MOD_RES (3)..(3): phosphothreonine
AETPDIKLFFFRKNLLRLTG

SEQ ID NO: 1377 - protein, 20 aa, Artificial Sequence
  Description of Artificial Sequence: Synthetic peptide
  MOD_RES (4)..(4): phosphoserine
AGFSFVNPKFFRKNLLRLTG

SEQ ID NO: 1378 - protein, 24 aa, Artificial Sequence
  Description of Artificial Sequence: Synthetic peptide
  MOD_RES (7)..(7): oxidized methionine
  MOD_RES (12)..(12): phosphoserine
AHDPSGMFRSQSFFFRKNLLRLTG

SEQ ID NO: 1379 - protein, 22 aa, Artificial Sequence
  Description of Artificial Sequence: Synthetic peptide
  MOD_RES (7)..(7): phosphoserine
ALDSGASLLHLFFRKNLLRLTG

SEQ ID NO: 1380 - protein, 22 aa, Artificial Sequence
  Description of Artificial Sequence: Synthetic peptide
  MOD_RES (3)..(3): oxidized methionine
  MOD_RES (5)..(5): phosphoserine
ALMGSPQLVAAFFRKNLLRLTG

SEQ ID NO: 1381 - protein, 21 aa, Artificial Sequence
  Description of Artificial Sequence: Synthetic peptide
  MOD_RES (9)..(9): phosphoserine
ALPPGSYASLFFRKNLLRLTG

SEQ ID NO: 1382 - protein, 23 aa, Artificial Sequence
  Description of Artificial Sequence: Synthetic peptide
  MOD_RES (8)..(8): phosphoserine
ALPTPALSPSLMFFRKNLLRLTG

SEQ ID NO: 1383 - protein, 20 aa, Artificial Sequence
  Description of Artificial Sequence: Synthetic peptide
  MOD_RES (4)..(4): phosphoserine
ALSSSFLVLFFRKNLLRLTG

SEQ ID NO: 1384 - protein, 20 aa, Artificial Sequence
  Description of Artificial Sequence: Synthetic peptide
  MOD_RES (5)..(5): phosphoserine
ALSSSFLVLFFRKNLLRLTG

SEQ ID NO: 1385 - protein, 20 aa, Artificial Sequence
  Description of Artificial Sequence: Synthetic peptide
  MOD_RES (4)..(4): phosphothreonine
ALSTPVVEKFFRKNLLRLTG

SEQ ID NO: 1386 - protein, 20 aa, Artificial Sequence
  Description of Artificial Sequence: Synthetic peptide
  MOD_RES (6)..(6): phosphotyrosine
ALVDGYFRLFFRKNLLRLTG

SEQ ID NO: 1387 - protein, 20 aa, Artificial Sequence
  Description of Artificial Sequence: Synthetic peptide
  MOD_RES (3)..(3): oxidized tryptophan
  MOD_RES (4)..(4): phosphoserine
ALWSPGLAKFFRKNLLRLTG

SEQ ID NO: 1388 - protein, 24 aa, Artificial Sequence
  Description of Artificial Sequence: Synthetic peptide
  MOD_RES (2)..(2): oxidized methionine
  MOD_RES (7)..(7): phosphoserine
AMLGSKSPDPYRLFFRKNLLRLTG

SEQ ID NO: 1389 - protein, 20 aa, Artificial Sequence
  Description of Artificial Sequence: Synthetic peptide
  MOD_RES (4)..(4): phosphoserine
APASPFRQLFFRKNLLRLTG

SEQ ID NO: 1390 - protein, 20 aa, Artificial Sequence
  Description of Artificial Sequence: Synthetic peptide
  MOD_RES (4)..(4): phosphoserine
APASPLRPLFFRKNLLRLTG

SEQ ID NO: 1391 - protein, 22 aa, Artificial Sequence
  Description of Artificial Sequence: Synthetic peptide
  MOD_RES (4)..(4): phosphoserine
APASPNHAGVLFFRKNLLRLTG

SEQ ID NO: 1392 - protein, 21 aa, Artificial Sequence
  Description of Artificial Sequence: Synthetic peptide
  MOD_RES (6)..(6): phosphothreonine
APFHLTPTLYFFRKNLLRLTG

SEQ ID NO: 1393 - protein, 21 aa, Artificial Sequence
  Description of Artificial Sequence: Synthetic peptide
  MOD_RES (4)..(4): phosphoserine
APKSPSSEWLFFRKNLLRLTG

SEQ ID NO: 1394 - protein, 21 aa, Artificial Sequence
  Description of Artificial Sequence: Synthetic peptide
  MOD_RES (4)..(4): phosphothreonine
APRTPPGVTFFFRKNLLRLTG

SEQ ID NO: 1395 - protein, 20 aa, Artificial Sequence
  Description of Artificial Sequence: Synthetic peptide
  MOD_RES (3)..(3): phosphoserine
APSSPDVKLFFRKNLLRLTG

SEQ ID NO: 1396 - protein, 20 aa, Artificial Sequence
  Description of Artificial Sequence: Synthetic peptide
  MOD_RES (4)..(4): phosphoserine
APSSPDVKLFFRKNLLRLTG

SEQ ID NO: 1397 - protein, 20 aa, Artificial Sequence
  Description of Artificial Sequence: Synthetic peptide
  MOD_RES (4)..(4): phosphoserine
APTSPLGHLFFRKNLLRLTG

SEQ ID NO: 1398 - protein, 20 aa, Artificial Sequence
  Description of Artificial Sequence: Synthetic peptide
  MOD_RES (4)..(4): phosphoserine
APVSPRPGLFFRKNLLRLTG

SEQ ID NO: 1399 - protein, 20 aa, Artificial Sequence
  Description of Artificial Sequence: Synthetic peptide
  MOD_RES (4)..(4): phosphoserine
  MOD_RES (9)..(9): oxidized methionine
ARFSGFYSMFFRKNLLRLTG

SEQ ID NO: 1400 - protein, 20 aa, Artificial Sequence
  Description of Artificial Sequence: Synthetic peptide
  MOD_RES (4)..(4): phosphoserine
ARFSGFYSMFFRKNLLRLTG

SEQ ID NO: 1401 - protein, 20 aa, Artificial Sequence
  Description of Artificial Sequence: Synthetic peptide
  MOD_RES (4)..(4): phosphoserine
ARFSPKVSLFFRKNLLRLTG

SEQ ID NO: 1402 - protein, 20 aa, Artificial Sequence
  Description of Artificial Sequence: Synthetic peptide
  MOD_RES (5)..(5): phosphoserine
ARGISPIVFFFRKNLLRLTG

SEQ ID NO: 1403 - protein, 21 aa, Artificial Sequence
  Description of Artificial Sequence: Synthetic peptide
  MOD_RES (4)..(4): phosphoserine
ARYSGSYNDYFFRKNLLRLTG

SEQ ID NO: 1404 - protein, 20 aa, Artificial Sequence
  Description of Artificial Sequence: Synthetic peptide
  MOD_RES (8)..(8): phosphoserine
ASFKAELSYFFRKNLLRLTG

SEQ ID NO: 1405 - protein, 21 aa, Artificial Sequence
  Description of Artificial Sequence: Synthetic peptide
  MOD_RES (4)..(4): phosphothreonine
ASFTPTSILKFFRKNLLRLTG

SEQ ID NO: 1406 - protein, 22 aa, Artificial Sequence
  Description of Artificial Sequence: Synthetic peptide
  MOD_RES (4)..(4): phosphothreonine
ASFTPTSILKRFFRKNLLRLTG

SEQ ID NO: 1407 - protein, 20 aa, Artificial Sequence
  Description of Artificial Sequence: Synthetic peptide
  MOD_RES (4)..(4): phosphoserine
ASLSPSVSKFFRKNLLRLTG

SEQ ID NO: 1408 - protein, 21 aa, Artificial Sequence
  Description of Artificial Sequence: Synthetic peptide
  MOD_RES (4)..(4): phosphoserine
ATISPPLQPKFFRKNLLRLTG

SEQ ID NO: 1409 - protein, 23 aa, Artificial Sequence
  Description of Artificial Sequence: Synthetic peptide
  MOD_RES (8)..(8): phosphoserine
AVILPPLSPYFKFFRKNLLRLTG

SEQ ID NO: 1410 - protein, 19 aa, Artificial Sequence
  Description of Artificial Sequence: Synthetic peptide
  MOD_RES (5)..(5): phosphotyrosine
AVLEYLKIFFRKNLLRLTG

SEQ ID NO: 1411 - protein, 22 aa, Artificial Sequence
  Description of Artificial Sequence: Synthetic peptide
  MOD_RES (6)..(6): phosphoserine
AVNQFSPSLARFFRKNLLRLTG

SEQ ID NO: 1412 - protein, 22 aa, Artificial Sequence
  Description of Artificial Sequence: Synthetic peptide
  MOD_RES (6)..(6): phosphoserine
AVRNFSPTDYYFFRKNLLRLTG

SEQ ID NO: 1413 - protein, 22 aa, Artificial Sequence
  Description of Artificial Sequence: Synthetic peptide
  MOD_RES (8)..(8): phosphothreonine
AVRNFSPTDYYFFRKNLLRLTG

SEQ ID NO: 1414 - protein, 23 aa, Artificial Sequence
  Description of Artificial Sequence: Synthetic peptide
  MOD_RES (6)..(6): phosphoserine
AWRRLSRDSGGYFFRKNLLRLTG

SEQ ID NO: 1415 - protein, 23 aa, Artificial Sequence
  Description of Artificial Sequence: Synthetic peptide
  MOD_RES (6)..(6): phosphothreonine
AYGGLTSPGLSYFFRKNLLRLTG

SEQ ID NO: 1416 - protein, 23 aa, Artificial Sequence
  Description of Artificial Sequence: Synthetic peptide
  MOD_RES (7)..(7): phosphoserine
AYGGLTSPGLSYFFRKNLLRLTG

SEQ ID NO: 1417 - protein, 20 aa, Artificial Sequence
  Description of Artificial Sequence: Synthetic peptide
  MOD_RES (4)..(4): phosphoserine
AYSSYVHQYFFRKNLLRLTG

SEQ ID NO: 1418 - protein, 19 aa, Artificial Sequence
  Description of Artificial Sequence: Synthetic peptide
  MOD_RES (2)..(2): phosphothreonine
CTFGSRQIFFRKNLLRLTG

SEQ ID NO: 1419 - protein, 20 aa, Artificial Sequence
  Description of Artificial Sequence: Synthetic peptide
  MOD_RES (4)..(4): phosphoserine
DFASPFHERFFRKNLLRLTG

SEQ ID NO: 1420 - protein, 21 aa, Artificial Sequence
  Description of Artificial Sequence: Synthetic peptide
  MOD_RES (4)..(4): phosphoserine
DFHSPIVLGRFFRKNLLRLTG

SEQ ID NO: 1421 - protein, 21 aa, Artificial Sequence
  Description of Artificial Sequence: Synthetic peptide
  MOD_RES (4)..(4): phosphoserine
DIASPTFRRLFFRKNLLRLTG

SEQ ID NO: 1422 - protein, 24 aa, Artificial Sequence
  Description of Artificial Sequence: Synthetic peptide
  MOD_RES (7)..(7): phosphoserine
DIIRQPSEEEIIKFFRKNLLRLTG

SEQ ID NO: 1423 - protein, 20 aa, Artificial Sequence
  Description of Artificial Sequence: Synthetic peptide
  MOD_RES (4)..(4): phosphoserine
DIKSVFEAFFFRKNLLRLTG

SEQ ID NO: 1424 - protein, 20 aa, Artificial Sequence
  Description of Artificial Sequence: Synthetic peptide
  MOD_RES (4)..(4): phosphoserine
DILSPRLIRFFRKNLLRLTG

SEQ ID NO: 1425 - protein, 22 aa, Artificial Sequence
  Description of Artificial Sequence: Synthetic peptide
  MOD_RES (6)..(6): phosphoserine
DIRRFSLTTLRFFRKNLLRLTG

SEQ ID NO: 1426 - protein, 20 aa, Artificial Sequence
  Description of Artificial Sequence: Synthetic peptide
  MOD_RES (3)..(3): phosphoserine
DISPPIFRRFFRKNLLRLTG

SEQ ID NO: 1427 - protein, 20 aa, Artificial Sequence
  Description of Artificial Sequence: Synthetic peptide
  MOD_RES (3)..(3): phosphothreonine
DLTLKKEKFFFRKNLLRLTG

SEQ ID NO: 1428 - protein, 23 aa, Artificial Sequence
  Description of Artificial Sequence: Synthetic peptide
  MOD_RES (6)..(6): phosphothreonine
DMLGLTKPAMPMFFRKNLLRLTG

SEQ ID NO: 1429 - protein, 22 aa, Artificial Sequence
  Description of Artificial Sequence: Synthetic peptide
  MOD_RES (4)..(4): phosphoserine
DNFSPDLRVLRFFRKNLLRLTG

SEQ ID NO: 1430 - protein, 20 aa, Artificial Sequence
  Description of Artificial Sequence: Synthetic peptide
  MOD_RES (8)..(8): phosphoserine
DPFGRPTSFFFRKNLLRLTG

SEQ ID NO: 1431 - protein, 20 aa, Artificial Sequence
  Description of Artificial Sequence: Synthetic peptide
  MOD_RES (8)..(8): phosphoserine
DPLIRWDSYFFRKNLLRLTG

SEQ ID NO: 1432 - protein, 20 aa, Artificial Sequence
  Description of Artificial Sequence: Synthetic peptide
  MOD_RES (8)..(8): phosphoserine
DPSLDLHSLFFRKNLLRLTG

SEQ ID NO: 1433 - protein, 22 aa, Artificial Sequence
  Description of Artificial Sequence: Synthetic peptide
  MOD_RES (5)..(5): oxidized methionine
  MOD_RES (7)..(7): phosphoserine
DSDPMLSPRFYFFRKNLLRLTG

SEQ ID NO: 1434 - protein, 22 aa, Artificial Sequence
  Description of Artificial Sequence: Synthetic peptide
  MOD_RES (7)..(7): phosphoserine
DSDPMLSPRFYFFRKNLLRLTG

SEQ ID NO: 1435 - protein, 24 aa, Artificial Sequence
  Description of Artificial Sequence: Synthetic peptide
  MOD_RES (5)..(5): oxidized methionine
  MOD_RES (7)..(7): phosphoserine
DSDPMLSPRFYAYFFRKNLLRLTG

SEQ ID NO: 1436 - protein, 24 aa, Artificial Sequence
  Description of Artificial Sequence: Synthetic peptide
  MOD_RES (7)..(7): phosphoserine
DSDPMLSPRFYAYFFRKNLLRLTG

SEQ ID NO: 1437 - protein, 26 aa, Artificial Sequence
  Description of Artificial Sequence: Synthetic peptide
  MOD_RES (2)..(2): phosphoserine
DSGEGDFLAEGGGVRFFRKNLLRLTG

SEQ ID NO: 1438 - protein, 20 aa, Artificial Sequence
  Description of Artificial Sequence: Synthetic peptide
  MOD_RES (4)..(4): phosphoserine
DSKSPLGFYFFRKNLLRLTG

SEQ ID NO: 1439 - protein, 21 aa, Artificial Sequence
  Description of Artificial Sequence: Synthetic peptide
  MOD_RES (4)..(4): phosphoserine
DTISLASERYFFRKNLLRLTG

SEQ ID NO: 1440 - protein, 20 aa, Artificial Sequence
  Description of Artificial Sequence: Synthetic peptide
  MOD_RES (4)..(4): phosphoserine
DTISPTLGFFFRKNLLRLTG

SEQ ID NO: 1441 - protein, 23 aa, Artificial Sequence
  Description of Artificial Sequence: Synthetic peptide
  MOD_RES (6)..(6): phosphoserine
DTQSGSLLFIGRFFRKNLLRLTG

SEQ ID NO: 1442 - protein, 22 aa, Artificial Sequence
  Description of Artificial Sequence: Synthetic peptide
  MOD_RES (3)..(3): phosphoserine
DTSSLPTVIMRFFRKNLLRLTG

SEQ ID NO: 1443 - protein, 22 aa, Artificial Sequence
  Description of Artificial Sequence: Synthetic peptide
  MOD_RES (4)..(4): phosphoserine
  MOD_RES (10)..(10): oxidized methionine
DTSSLPTVIMRFFRKNLLRLTG

SEQ ID NO: 1444 - protein, 22 aa, Artificial Sequence
  Description of Artificial Sequence: Synthetic peptide
  MOD_RES (4)..(4): phosphoserine
DTSSLPTVIMRFFRKNLLRLTG

SEQ ID NO: 1445 - protein, 21 aa, Artificial Sequence
  Description of Artificial Sequence: Synthetic peptide
  MOD_RES (4)..(4): phosphoserine
DTTSLRTLRIFFRKNLLRLTG

SEQ ID NO: 1446 - protein, 22 aa, Artificial Sequence
  Description of Artificial Sequence: Synthetic peptide
  MOD_RES (4)..(4): phosphoserine
DVASPDGLGRLFFRKNLLRLTG

SEQ ID NO: 1447 - protein, 19 aa, Artificial Sequence
  Description of Artificial Sequence: Synthetic peptide
  MOD_RES (4)..(4): phosphoserine
DVASPTLRFFRKNLLRLTG

SEQ ID NO: 1448 - protein, 20 aa, Artificial Sequence
  Description of Artificial Sequence: Synthetic peptide
  MOD_RES (4)..(4): phosphoserine
DVASPTLRRFFRKNLLRLTG

SEQ ID NO: 1449 - protein, 21 aa, Artificial Sequence
  Description of Artificial Sequence: Synthetic peptide
  MOD_RES (4)..(4): phosphoserine
DVASPTLRRLFFRKNLLRLTG

SEQ ID NO: 1450 - protein, 22 aa, Artificial Sequence
  Description of Artificial Sequence: Synthetic peptide
  MOD_RES (5)..(5): phosphoserine
DVIDSQELSKVFFRKNLLRLTG

SEQ ID NO: 1451 - protein, 21 aa, Artificial Sequence
  Description of Artificial Sequence: Synthetic peptide
  MOD_RES (6)..(6): phosphothreonine
DVYSGTPTKVFFRKNLLRLTG

SEQ ID NO: 1452 - protein, 20 aa, Artificial Sequence
  Description of Artificial Sequence: Synthetic peptide
  MOD_RES (8)..(8): phosphothreonine
DYSPYFKTIFFRKNLLRLTG

SEQ ID NO: 1453 - protein, 20 aa, Artificial Sequence
  Description of Artificial Sequence: Synthetic peptide
  MOD_RES (3)..(3): phosphoserine
EASSPVPYLFFRKNLLRLTG

SEQ ID NO: 1454 - protein, 20 aa, Artificial Sequence
  Description of Artificial Sequence: Synthetic peptide
  MOD_RES (4)..(4): phosphoserine
EASSPVPYLFFRKNLLRLTG

SEQ ID NO: 1455 - protein, 21 aa, Artificial Sequence
  Description of Artificial Sequence: Synthetic peptide
  MOD_RES (6)..(6): phosphothreonine
EEAPQTPVAFFFRKNLLRLTG

SEQ ID NO: 1456 - protein, 20 aa, Artificial Sequence
  Description of Artificial Sequence: Synthetic peptide
  MOD_RES (4)..(4): phosphothreonine
EEDTYEKVFFFRKNLLRLTG

SEQ ID NO: 1457 - protein, 22 aa, Artificial Sequence
  Description of Artificial Sequence: Synthetic peptide
  MOD_RES (4)..(4): phosphoserine
  MOD_RES (10)..(10): oxidized methionine
EEFSPRQAQMFFFRKNLLRLTG

SEQ ID NO: 1458 - protein, 22 aa, Artificial Sequence
  Description of Artificial Sequence: Synthetic peptide
  MOD_RES (4)..(4): phosphoserine
EEFSPRQAQMFFFRKNLLRLTG

SEQ ID NO: 1459 - protein, 22 aa, Artificial Sequence
  Description of Artificial Sequence: Synthetic peptide
  MOD_RES (4)..(4): phosphoserine
EEISPTKFPGLFFRKNLLRLTG

SEQ ID NO: 1460 - protein, 23 aa, Artificial Sequence
  Description of Artificial Sequence: Synthetic peptide
  MOD_RES (4)..(4): phosphoserine
EEISPTKFPGLYFFRKNLLRLTG

SEQ ID NO: 1461 - protein, 22 aa, Artificial Sequence
  Description of Artificial Sequence: Synthetic peptide
  MOD_RES (4)..(4): phosphoserine
EELSPLALGRFFFRKNLLRLTG

SEQ ID NO: 1462 - protein, 21 aa, Artificial Sequence
  Description of Artificial Sequence: Synthetic peptide
  MOD_RES (4)..(4): phosphoserine
EELSPSTVLYFFRKNLLRLTG

SEQ ID NO: 1463 - protein, 21 aa, Artificial Sequence
  Description of Artificial Sequence: Synthetic peptide
  MOD_RES (6)..(6): phosphoserine
EELSPSTVLYFFRKNLLRLTG

SEQ ID NO: 1464 - protein, 20 aa, Artificial Sequence
  Description of Artificial Sequence: Synthetic peptide
  MOD_RES (6)..(6): phosphothreonine
EELSPTAKFFFRKNLLRLTG

SEQ ID NO: 1465 - protein, 20 aa, Artificial Sequence
  Description of Artificial Sequence: Synthetic peptide
  MOD_RES (5)..(5): phosphothreonine
EGPETGYSLFFRKNLLRLTG

SEQ ID NO: 1466 - protein, 22 aa, Artificial Sequence
  Description of Artificial Sequence: Synthetic peptide
  MOD_RES (7)..(7): phosphoserine
EHERSISPLLFFFRKNLLRLTG

SEQ ID NO: 1467 - protein, 21 aa, Artificial Sequence
  Description of Artificial Sequence: Synthetic peptide
  MOD_RES (6)..(6): phosphoserine
EIVNFSPIARFFRKNLLRLTG

SEQ ID NO: 1468 - protein, 20 aa, Artificial Sequence
  Description of Artificial Sequence: Synthetic peptide
  MOD_RES (8)..(8): phosphoserine
ERLKIRGSLFFRKNLLRLTG

SEQ ID NO: 1469 - protein, 20 aa, Artificial Sequence
  Description of Artificial Sequence: Synthetic peptide
  MOD_RES (8)..(8): phosphoserine
ERVDSLVSLFFRKNLLRLTG

SEQ ID NO: 1470 - protein, 24 aa, Artificial Sequence
  Description of Artificial Sequence: Synthetic peptide
  MOD_RES (6)..(6): phosphotyrosine
ESFSDYPPLGRFAFFRKNLLRLTG

SEQ ID NO: 1471 - protein, 22 aa, Artificial Sequence
  Description of Artificial Sequence: Synthetic peptide
  MOD_RES (4)..(4): phosphoserine
  MOD_RES (9)..(9): oxidized methionine
ESLSPIGDMKVFFRKNLLRLTG

SEQ ID NO: 1472 - protein, 22 aa, Artificial Sequence
  Description of Artificial Sequence: Synthetic peptide
  MOD_RES (4)..(4): phosphoserine
ESLSPIGDMKVFFRKNLLRLTG

SEQ ID NO: 1473 - protein, 21 aa, Artificial Sequence
  Description of Artificial Sequence: Synthetic peptide
  MOD_RES (9)..(9): phosphoserine
ESVYKASLSLFFRKNLLRLTG

SEQ ID NO: 1474 - protein, 21 aa, Artificial Sequence
  Description of Artificial Sequence: Synthetic peptide
  MOD_RES (6)..(6): phosphoserine
ETRRPSYLEWFFRKNLLRLTG

SEQ ID NO: 1475 - protein, 22 aa, Artificial Sequence
  Description of Artificial Sequence: Synthetic peptide
  MOD_RES (7)..(7): phosphoserine
EVIRKGSITEYFFRKNLLRLTG

SEQ ID NO: 1476 - protein, 21 aa, Artificial Sequence
  Description of Artificial Sequence: Synthetic peptide
  MOD_RES (4)..(4): phosphoserine
EVISQHLVSYFFRKNLLRLTG

SEQ ID NO: 1477 - protein, 20 aa, Artificial Sequence
  Description of Artificial Sequence: Synthetic peptide
  MOD_RES (4)..(4): phosphoserine
EVISVLQKYFFRKNLLRLTG

SEQ ID NO: 1478 - protein, 20 aa, Artificial Sequence
  Description of Artificial Sequence: Synthetic peptide
  MOD_RES (8)..(8): phosphoserine
EVLERKISMFFRKNLLRLTG

SEQ ID NO: 1479 - protein, 21 aa, Artificial Sequence
  Description of Artificial Sequence: Synthetic peptide
  MOD_RES (7)..(7): phosphothreonine
FAFPGSTNSLFFRKNLLRLTG

SEQ ID NO: 1480 - protein, 21 aa, Artificial Sequence
  Description of Artificial Sequence: Synthetic peptide
  MOD_RES (9)..(9): phosphoserine
FAFPGSTNSLFFRKNLLRLTG

SEQ ID NO: 1481 - protein, 21 aa, Artificial Sequence
  Description of Artificial Sequence: Synthetic peptide
  MOD_RES (5)..(5): phosphothreonine
FASPTSPPVLFFRKNLLRLTG

SEQ ID NO: 1482 - protein, 21 aa, Artificial Sequence
  Description of Artificial Sequence: Synthetic peptide
  MOD_RES (6)..(6): phosphoserine
FASPTSPPVLFFRKNLLRLTG

SEQ ID NO: 1483 - protein, 20 aa, Artificial Sequence
  Description of Artificial Sequence: Synthetic peptide
  MOD_RES (8)..(8): phosphoserine
FATIKSASLFFRKNLLRLTG

SEQ ID NO: 1484 - protein, 20 aa, Artificial Sequence
  Description of Artificial Sequence: Synthetic peptide
  MOD_RES (8)..(8): phosphoserine
FATIRTASLFFRKNLLRLTG

SEQ ID NO: 1485 - protein, 24 aa, Artificial Sequence
  Description of Artificial Sequence: Synthetic peptide
  MOD_RES (4)..(4): phosphoserine
FAVSPIPGRGGVLFFRKNLLRLTG

SEQ ID NO: 1486 - protein, 22 aa, Artificial Sequence
  Description of Artificial Sequence: Synthetic peptide
  MOD_RES (3)..(3): oxidized tryptophan
  MOD_RES (4)..(4): phosphoserine
FAWSPLAGEKFFFRKNLLRLTG

SEQ ID NO: 1487 - protein, 22 aa, Artificial Sequence
  Description of Artificial Sequence: Synthetic peptide
  MOD_RES (4)..(4): phosphoserine
FAWSPLAGEKFFFRKNLLRLTG

SEQ ID NO: 1488 - protein, 23 aa, Artificial Sequence
  Description of Artificial Sequence: Synthetic peptide
  MOD_RES (4)..(4): phosphoserine
  MOD_RES (11)..(11): oxidized methionine
FAYSPGGAHGMLFFRKNLLRLTG

SEQ ID NO: 1489 - protein, 20 aa, Artificial Sequence
  Description of Artificial Sequence: Synthetic peptide
  MOD_RES (4)..(4): phosphothreonine
FFFTARTSFFFRKNLLRLTG

SEQ ID NO: 1490 - protein, 19 aa, Artificial Sequence
  Description of Artificial Sequence: Synthetic peptide
  MOD_RES (7)..(7): phosphothreonine
FGGQRLTLFFRKNLLRLTG

SEQ ID NO: 1491 - protein, 20 aa, Artificial Sequence
  Description of Artificial Sequence: Synthetic peptide
  MOD_RES (8)..(8): phosphoserine
FHGISTVSLFFRKNLLRLTG

SEQ ID NO: 1492 - protein, 19 aa, Artificial Sequence
  Description of Artificial Sequence: Synthetic peptide
  MOD_RES (4)..(4): phosphothreonine
FHVTPLKLFFRKNLLRLTG

SEQ ID NO: 1493 - protein, 22 aa, Artificial Sequence
  Description of Artificial Sequence: Synthetic peptide
  MOD_RES (4)..(4): phosphoserine
FIVSPVPESRLFFRKNLLRLTG

SEQ ID NO: 1494 - protein, 21 aa, Artificial Sequence
  Description of Artificial Sequence: Synthetic peptide
  MOD_RES (4)..(4): phosphoserine
FKVSPLTFGRFFRKNLLRLTG

SEQ ID NO: 1495 - protein, 20 aa, Artificial Sequence
  Description of Artificial Sequence: Synthetic peptide
  MOD_RES (4)..(4): phosphoserine
FLDSAYFRLFFRKNLLRLTG

SEQ ID NO: 1496 - protein, 21 aa, Artificial Sequence
  Description of Artificial Sequence: Synthetic peptide
  MOD_RES (4)..(4): phosphoserine
FLDSGTIRGVFFRKNLLRLTG

SEQ ID NO: 1497 - protein, 22 aa, Artificial Sequence
  Description of Artificial Sequence: Synthetic peptide
  MOD_RES (4)..(4): phosphoserine
FLFSPPEVTGRFFRKNLLRLTG

SEQ ID NO: 1498 - protein, 22 aa, Artificial Sequence
  Description of Artificial Sequence: Synthetic peptide
  MOD_RES (5)..(5): phosphoserine
FLKPSTSGDSLFFRKNLLRLTG

SEQ ID NO: 1499 - protein, 22 aa, Artificial Sequence
  Description of Artificial Sequence: Synthetic peptide
  MOD_RES (7)..(7): phosphoserine
FLKPSTSGDSLFFRKNLLRLTG

SEQ ID NO: 1500 - protein, 22 aa, Artificial Sequence
  Description of Artificial Sequence: Synthetic peptide
  MOD_RES (10)..(10): phosphoserine
FLKPSTSGDSLFFRKNLLRLTG

SEQ ID NO: 1501 - protein, 21 aa, Artificial Sequence
  Description of Artificial Sequence: Synthetic peptide
  MOD_RES (9)..(9): phosphoserine
FLNEKARLSYFFRKNLLRLTG

SEQ ID NO: 1502 - protein, 20 aa, Artificial Sequence
  Description of Artificial Sequence: Synthetic peptide
  MOD_RES (3)..(3): phosphoserine
FLSRSIPSLFFRKNLLRLTG

SEQ ID NO: 1503 - protein, 24 aa, Artificial Sequence
  Description of Artificial Sequence: Synthetic peptide
  MOD_RES (5)..(5): phosphoserine
FPDNSDVSSIGRLFFRKNLLRLTG

SEQ ID NO: 1504 - protein, 24 aa, Artificial Sequence
  Description of Artificial Sequence: Synthetic peptide
  MOD_RES (9)..(9): phosphoserine
FPDNSDVSSIGRLFFRKNLLRLTG

SEQ ID NO: 1505 - protein, 20 aa, Artificial Sequence
  Description of Artificial Sequence: Synthetic peptide
  MOD_RES (8)..(8): phosphoserine
FPLMRSKSLFFRKNLLRLTG

SEQ ID NO: 1506 - protein, 22 aa, Artificial Sequence
  Description of Artificial Sequence: Synthetic peptide
  MOD_RES (4)..(4): phosphoserine
FPLSPTKLSQYFFRKNLLRLTG

SEQ ID NO: 1507 - protein, 20 aa, Artificial Sequence
  Description of Artificial Sequence: Synthetic peptide
  MOD_RES (6)..(6): phosphoserine
FPSMPSPRLFFRKNLLRLTG

SEQ ID NO: 1508 - protein, 20 aa, Artificial Sequence
  Description of Artificial Sequence: Synthetic peptide
  MOD_RES (8)..(8): phosphoserine
FQYSKSPSLFFRKNLLRLTG

SEQ ID NO: 1509 - protein, 22 aa, Artificial Sequence
  Description of Artificial Sequence: Synthetic peptide
  MOD_RES (4)..(4): phosphoserine
FRFSPMGVDHMFFRKNLLRLTG

SEQ ID NO: 1510 - protein, 24 aa, Artificial Sequence
  Description of Artificial Sequence: Synthetic peptide
  MOD_RES (7)..(7): phosphothreonine
FRPPPLTPEDVGFFFRKNLLRLTG

SEQ ID NO: 1511 - protein, 25 aa, Artificial Sequence
  Description of Artificial Sequence: Synthetic peptide
  MOD_RES (12)..(12): phosphothreonine
FRRPDIQYPDATDEFFRKNLLRLTG

SEQ ID NO: 1512 - protein, 21 aa, Artificial Sequence
  Description of Artificial Sequence: Synthetic peptide
  MOD_RES (4)..(4): phosphoserine
FRRSDDMFTFFFRKNLLRLTG

SEQ ID NO: 1513 - protein, 20 aa, Artificial Sequence
  Description of Artificial Sequence: Synthetic peptide
  MOD_RES (7)..(7): phosphothreonine
FRYSGKTEYFFRKNLLRLTG

SEQ ID NO: 1514 - protein, 20 aa, Artificial Sequence
  Description of Artificial Sequence: Synthetic peptide
  MOD_RES (6)..(6): phosphoserine
FSFKKSFKLFFRKNLLRLTG

SEQ ID NO: 1515 - protein, 22 aa, Artificial Sequence
  Description of Artificial Sequence: Synthetic peptide
  MOD_RES (4)..(4): phosphoserine
FSFSPGAGAFRFFRKNLLRLTG

SEQ ID NO: 1516 - protein, 23 aa, Artificial Sequence
  Description of Artificial Sequence: Synthetic peptide
  MOD_RES (6)..(6): phosphoserine
  MOD_RES (9)..(9): oxidized methionine
FSLRYSPGMDAYFFRKNLLRLTG

SEQ ID NO: 1517 - protein, 23 aa, Artificial Sequence
  Description of Artificial Sequence: Synthetic peptide
  MOD_RES (6)..(6): phosphoserine
FSLRYSPGMDAYFFRKNLLRLTG

SEQ ID NO: 1518 - protein, 24 aa, Artificial Sequence
  Description of Artificial Sequence: Synthetic peptide
  MOD_RES (7)..(7): phosphoserine
FSRPSMSPTPLDRFFRKNLLRLTG

SEQ ID NO: 1519 - protein, 20 aa, Artificial Sequence
  Description of Artificial Sequence: Synthetic peptide
  MOD_RES (5)..(5): phosphoserine
FSVDSPRIYFFRKNLLRLTG

SEQ ID NO: 1520 - protein, 20 aa, Artificial Sequence
  Description of Artificial Sequence: Synthetic peptide
  MOD_RES (8)..(8): phosphoserine
FTIFRTISVFFRKNLLRLTG

SEQ ID NO: 1521 - protein, 19 aa, Artificial Sequence
  Description of Artificial Sequence: Synthetic peptide
  MOD_RES (2)..(2): phosphothreonine
FTPPVVKRFFRKNLLRLTG

SEQ ID NO: 1522 - protein, 21 aa, Artificial Sequence
  Description of Artificial Sequence: Synthetic peptide
  MOD_RES (4)..(4): phosphoserine
FVLSPIKEPAFFRKNLLRLTG

SEQ ID NO: 1523 - protein, 21 aa, Artificial Sequence
  Description of Artificial Sequence: Synthetic peptide
  MOD_RES (4)..(4): phosphoserine
FVRSPGTGAFFFRKNLLRLTG

SEQ ID NO: 1524 - protein, 20 aa, Artificial Sequence
  Description of Artificial Sequence: Synthetic peptide
  MOD_RES (3)..(3): phosphothreonine
FVTTPTAELFFRKNLLRLTG

SEQ ID NO: 1525 - protein, 20 aa, Artificial Sequence
  Description of Artificial Sequence: Synthetic peptide
  MOD_RES (4)..(4): phosphothreonine
FVTTPTAELFFRKNLLRLTG

SEQ ID NO: 1526 - protein, 20 aa, Artificial Sequence
  Description of Artificial Sequence: Synthetic peptide
  MOD_RES (6)..(6): phosphothreonine
FVTTPTAELFFRKNLLRLTG

SEQ ID NO: 1527 - protein, 21 aa, Artificial Sequence
  Description of Artificial Sequence: Synthetic peptide
  MOD_RES (4)..(4): phosphoserine
FYYSPSGKKFFFRKNLLRLTG

SEQ ID NO: 1528 - protein, 20 aa, Artificial Sequence
  Description of Artificial Sequence: Synthetic peptide
  MOD_RES (4)..(4): phosphoserine
GALSRYLFRFFRKNLLRLTG

SEQ ID NO: 1529 - protein, 21 aa, Artificial Sequence
  Description of Artificial Sequence: Synthetic peptide
  MOD_RES (6)..(6): phosphoserine
GEDPLSPRALFFRKNLLRLTG

SEQ ID NO: 1530 - protein, 21 aa, Artificial Sequence
  Description of Artificial Sequence: Synthetic peptide
  MOD_RES (5)..(5): phosphoserine
GELESIGELFFFRKNLLRLTG

SEQ ID NO: 1531 - protein, 20 aa, Artificial Sequence
  Description of Artificial Sequence: Synthetic peptide
  MOD_RES (3)..(3): oxidized methionine
  MOD_RES (4)..(4): phosphoserine
GEMSPQRFFFFRKNLLRLTG

SEQ ID NO: 1532 - protein, 20 aa, Artificial Sequence
  Description of Artificial Sequence: Synthetic peptide
  MOD_RES (4)..(4): phosphoserine
GEMSPQRFFFFRKNLLRLTG

SEQ ID NO: 1533 - protein, 21 aa, Artificial Sequence
  Description of Artificial Sequence: Synthetic peptide
  MOD_RES (3)..(3): oxidized methionine
  MOD_RES (4)..(4): phosphoserine
GEMSPQRFFFFFRKNLLRLTG

SEQ ID NO: 1534 - protein, 20 aa, Artificial Sequence
  Description of Artificial Sequence: Synthetic peptide
  MOD_RES (5)..(5): phosphoserine
GENKSPLLLFFRKNLLRLTG

SEQ ID NO: 1535 - protein, 27 aa, Artificial Sequence
  Description of Artificial Sequence: Synthetic peptide
  MOD_RES (7)..(7): phosphothreonine
GEPRAPTPPSGTEVTLFFRKNLLRLTG

SEQ ID NO: 1536 - protein, 21 aa, Artificial Sequence
  Description of Artificial Sequence: Synthetic peptide
  MOD_RES (4)..(4): phosphoserine
GEPSPPHDILFFRKNLLRLTG

SEQ ID NO: 1537 - protein, 22 aa, Artificial Sequence
  Description of Artificial Sequence: Synthetic peptide
  MOD_RES (3)..(3): phosphothreonine
GETSPRTKITWFFRKNLLRLTG

SEQ ID NO: 1538 - protein, 22 aa, Artificial Sequence
  Description of Artificial Sequence: Synthetic peptide
  MOD_RES (4)..(4): phosphoserine
GETSPRTKITWFFRKNLLRLTG

SEQ ID NO: 1539 - protein, 22 aa, Artificial Sequence
  Description of Artificial Sequence: Synthetic peptide
  MOD_RES (3)..(3): oxidized tryptophan
  MOD_RES (4)..(4): phosphoserine
GEWSASLPHRFFFRKNLLRLTG

SEQ ID NO: 1540 - protein, 22 aa, Artificial Sequence
  Description of Artificial Sequence: Synthetic peptide
  MOD_RES (3)..(3): oxidized tryptophan
  MOD_RES (6)..(6): phosphoserine
GEWSASLPHRFFFRKNLLRLTG

SEQ ID NO: 1541 - protein, 22 aa, Artificial Sequence
  Description of Artificial Sequence: Synthetic peptide
  MOD_RES (4)..(4): phosphoserine
GEWSASLPHRFFFRKNLLRLTG

SEQ ID NO: 1542 - protein, 21 aa, Artificial Sequence
  Description of Artificial Sequence: Synthetic peptide
  MOD_RES (4)..(4): phosphoserine
GEYSPGTALPFFRKNLLRLTG

SEQ ID NO: 1543 - protein, 21 aa, Artificial Sequence
  Description of Artificial Sequence: Synthetic peptide
  MOD_RES (5)..(5): phosphoserine
GGLTSPGLSYFFRKNLLRLTG

SEQ ID NO: 1544 - protein, 27 aa, Artificial Sequence
  Description of Artificial Sequence: Synthetic peptide
  MOD_RES (15)..(15): phosphoserine
GGSISVQVNSIKFDSEFFRKNLLRLTG

SEQ ID NO: 1545 - protein, 20 aa, Artificial Sequence
  Description of Artificial Sequence: Synthetic peptide
  MOD_RES (4)..(4): phosphoserine
GHGSPFPSLFFRKNLLRLTG

SEQ ID NO: 1546 - protein, 21 aa, Artificial Sequence
  Description of Artificial Sequence: Synthetic peptide
  MOD_RES (6)..(6): phosphothreonine
GIFPGTPLKKFFRKNLLRLTG

SEQ ID NO: 1547 - protein, 21 aa, Artificial Sequence
  Description of Artificial Sequence: Synthetic peptide
  MOD_RES (5)..(5): phosphoserine
GIISSPLTGKFFRKNLLRLTG

SEQ ID NO: 1548 - protein, 21 aa, Artificial Sequence
  Description of Artificial Sequence: Synthetic peptide
  MOD_RES (8)..(8): phosphothreonine
GIISSPLTGKFFRKNLLRLTG

SEQ ID NO: 1549 - protein, 20 aa, Artificial Sequence
  Description of Artificial Sequence: Synthetic peptide
  MOD_RES (3)..(3): oxidized methionine
  MOD_RES (4)..(4): phosphoserine
GIMSPLAKKFFRKNLLRLTG

SEQ ID NO: 1550 - protein, 22 aa, Artificial Sequence
  Description of Artificial Sequence: Synthetic peptide
  MOD_RES (4)..(4): phosphoserine
GLFSPIRSSAFFFRKNLLRLTG

SEQ ID NO: 1551 - protein, 25 aa, Artificial Sequence
  Description of Artificial Sequence: Synthetic peptide
  MOD_RES (4)..(4): phosphoserine
GLLSLSALGSQAHLFFRKNLLRLTG

SEQ ID NO: 1552 - protein, 23 aa, Artificial Sequence
  Description of Artificial Sequence: Synthetic peptide
  MOD_RES (7)..(7): phosphoserine
GLPGGGSPTTFLFFRKNLLRLTG

SEQ ID NO: 1553 - protein, 20 aa, Artificial Sequence
  Description of Artificial Sequence: Synthetic peptide
  MOD_RES (4)..(4): phosphoserine
GLSSLSIHLFFRKNLLRLTG

SEQ ID NO: 1554 - protein, 22 aa, Artificial Sequence
  Description of Artificial Sequence: Synthetic peptide
  MOD_RES (4)..(4): phosphoserine
GLTSPGLSYSLFFRKNLLRLTG

SEQ ID NO: 1555 - protein, 20 aa, Artificial Sequence
  Description of Artificial Sequence: Synthetic peptide
  MOD_RES (3)..(3): phosphothreonine
GLTVSIPGLFFRKNLLRLTG

SEQ ID NO: 1556 - protein, 21 aa, Artificial Sequence
  Description of Artificial Sequence: Synthetic peptide
  MOD_RES (6)..(6): phosphoserine
GMAILSLLLKFFRKNLLRLTG

SEQ ID NO: 1557 - protein, 26 aa, Artificial Sequence
  Description of Artificial Sequence: Synthetic peptide
  MOD_RES (14)..(14): phosphothreonine
GPGHHHKPGLGEGTPFFRKNLLRLTG

SEQ ID NO: 1558 - protein, 20 aa, Artificial Sequence
  Description of Artificial Sequence: Synthetic peptide
  MOD_RES (8)..(8): phosphoserine
GPLSRVKSLFFRKNLLRLTG

SEQ ID NO: 1559 - protein, 20 aa, Artificial Sequence
  Description of Artificial Sequence: Synthetic peptide
  MOD_RES (8)..(8): phosphoserine
GPLVRQISLFFRKNLLRLTG

SEQ ID NO: 1560 - protein, 22 aa, Artificial Sequence
  Description of Artificial Sequence: Synthetic peptide
  MOD_RES (8)..(8): phosphothreonine
GPRAPSPTKPLFFRKNLLRLTG

SEQ ID NO: 1561 - protein, 19 aa, Artificial Sequence
  Description of Artificial Sequence: Synthetic peptide
  MOD_RES (4)..(4): phosphoserine
GPRSASLLFFRKNLLRLTG

SEQ ID NO: 1562 - protein, 21 aa, Artificial Sequence
  Description of Artificial Sequence: Synthetic peptide
  MOD_RES (6)..(6): phosphothreonine
GPRSFTPLSIFFRKNLLRLTG

SEQ ID NO: 1563 - protein, 20 aa, Artificial Sequence
  Description of Artificial Sequence: Synthetic peptide
  MOD_RES (4)..(4): phosphoserine
GPRSPKAWLFFRKNLLRLTG

SEQ ID NO: 1564 - protein, 21 aa, Artificial Sequence
  Description of Artificial Sequence: Synthetic peptide
  MOD_RES (4)..(4): phosphothreonine
GPRTPTQPLLFFRKNLLRLTG

SEQ ID NO: 1565 - protein, 22 aa, Artificial Sequence
  Description of Artificial Sequence: Synthetic peptide
  MOD_RES (4)..(4): phosphoserine
GRNSLSSLPTYFFRKNLLRLTG

SEQ ID NO: 1566 - protein, 20 aa, Artificial Sequence
  Description of Artificial Sequence: Synthetic peptide
  MOD_RES (6)..(6): phosphoserine
GRQSPSFKLFFRKNLLRLTG

SEQ ID NO: 1567 - protein, 21 aa, Artificial Sequence
  Description of Artificial Sequence: Synthetic peptide
  MOD_RES (5)..(5): phosphoserine
GSFASPGRLFFFRKNLLRLTG

SEQ ID NO: 1568 - protein, 20 aa, Artificial Sequence
  Description of Artificial Sequence: Synthetic peptide
  MOD_RES (2)..(2): phosphoserine
GSFRGFPALFFRKNLLRLTG

SEQ ID NO: 1569 - protein, 21 aa, Artificial Sequence
  Description of Artificial Sequence: Synthetic peptide
  MOD_RES (4)..(4): phosphoserine
GSKSPDPYRLFFRKNLLRLTG

SEQ ID NO: 1570 - protein, 20 aa, Artificial Sequence
  Description of Artificial Sequence: Synthetic peptide
  MOD_RES (4)..(4): phosphoserine
GSRSLYNLRFFRKNLLRLTG

SEQ ID NO: 1571 - protein, 20 aa, Artificial Sequence
  Description of Artificial Sequence: Synthetic peptide
  MOD_RES (8)..(8): phosphoserine
GTFPKALSIFFRKNLLRLTG

SEQ ID NO: 1572 - protein, 23 aa, Artificial Sequence
  Description of Artificial Sequence: Synthetic peptide
  MOD_RES (2)..(2): phosphothreonine
GTPLSQAIIHQYFFRKNLLRLTG

SEQ ID NO: 1573 - protein, 22 aa, Artificial Sequence
  Description of Artificial Sequence: Synthetic peptide
  MOD_RES (4)..(4): phosphothreonine
GTVTPPPRLVKFFRKNLLRLTG

SEQ ID NO: 1574 - protein, 24 aa, Artificial Sequence
  Description of Artificial Sequence: Synthetic peptide
  MOD_RES (7)..(7): phosphoserine
GTYVPSSPTRLAYFFRKNLLRLTG

SEQ ID NO: 1575 - protein, 21 aa, Artificial Sequence
  Description of Artificial Sequence: Synthetic peptide
  MOD_RES (5)..(5): phosphoserine
GVIKSPSWQRFFRKNLLRLTG

SEQ ID NO: 1576 - protein, 21 aa, Artificial Sequence
  Description of Artificial Sequence: Synthetic peptide
  MOD_RES (4)..(4): phosphoserine
GVISPQELLKFFRKNLLRLTG

SEQ ID NO: 1577 - protein, 22 aa, Artificial Sequence
  Description of Artificial Sequence: Synthetic peptide
  MOD_RES (4)..(4): phosphoserine
GVISPQELLKKFFRKNLLRLTG

SEQ ID NO: 1578 - protein, 22 aa, Artificial Sequence
  Description of Artificial Sequence: Synthetic peptide
  MOD_RES (4)..(4): phosphoserine
GVLSPDTISSKFFRKNLLRLTG

SEQ ID NO: 1579 - protein, 20 aa, Artificial Sequence
  Description of Artificial Sequence: Synthetic peptide
  MOD_RES (3)..(3): oxidized methionine
  MOD_RES (4)..(4): phosphothreonine
GVMTPLIKRFFRKNLLRLTG

SEQ ID NO: 1580 - protein, 20 aa, Artificial Sequence
  Description of Artificial Sequence: Synthetic peptide
  MOD_RES (4)..(4): phosphothreonine
GVMTPLIKRFFRKNLLRLTG

SEQ ID NO: 1581 - protein, 21 aa, Artificial Sequence
  Description of Artificial Sequence: Synthetic peptide
  MOD_RES (4)..(4): phosphoserine
HEFSSPSHLLFFRKNLLRLTG

SEQ ID NO: 1582 - protein, 21 aa, Artificial Sequence
  Description of Artificial Sequence: Synthetic peptide
  MOD_RES (5)..(5): phosphoserine
HEFSSPSHLLFFRKNLLRLTG

SEQ ID NO: 1583 - protein, 20 aa, Artificial Sequence
  Description of Artificial Sequence: Synthetic peptide
  MOD_RES (4)..(4): phosphoserine
HELSDITELFFRKNLLRLTG

SEQ ID NO: 1584 - protein, 20 aa, Artificial Sequence
  Description of Artificial Sequence: Synthetic peptide
  MOD_RES (6)..(6): phosphoserine
HERSISPLLFFRKNLLRLTG

SEQ ID NO: 1585 - protein, 20 aa, Artificial Sequence
  Description of Artificial Sequence: Synthetic peptide
  MOD_RES (4)..(4): phosphoserine
HFDSPPHLLFFRKNLLRLTG

SEQ ID NO: 1586 - protein, 23 aa, Artificial Sequence
  Description of Artificial Sequence: Synthetic peptide
  MOD_RES (11)..(11): phosphothreonine
HHHKPGLGEGTPFFRKNLLRLTG

SEQ ID NO: 1587 - protein, 21 aa, Artificial Sequence
  Description of Artificial Sequence: Synthetic peptide
  MOD_RES (9)..(9): phosphothreonine
HHPGLGEGTPFFRKNLLRLTG

SEQ ID NO: 1588 - protein, 20 aa, Artificial Sequence
  Description of Artificial Sequence: Synthetic peptide
  MOD_RES (4)..(4): phosphoserine
HKISDYFEYFFRKNLLRLTG

SEQ ID NO: 1589 - protein, 21 aa, Artificial Sequence
  Description of Artificial Sequence: Synthetic peptide
  MOD_RES (5)..(5): phosphothreonine
HLLETTPKSEFFRKNLLRLTG

SEQ ID NO: 1590 - protein, 21 aa, Artificial Sequence
  Description of Artificial Sequence: Synthetic peptide
  MOD_RES (6)..(6): phosphothreonine
HLLETTPKSEFFRKNLLRLTG

SEQ ID NO: 1591 - protein, 20 aa, Artificial Sequence
  Description of Artificial Sequence: Synthetic peptide
  MOD_RES (6)..(6): phosphothreonine
HLLSPTKGIFFRKNLLRLTG

SEQ ID NO: 1592 - protein, 20 aa, Artificial Sequence
  Description of Artificial Sequence: Synthetic peptide
  MOD_RES (4)..(4): phosphoserine
HLNSLDVQLFFRKNLLRLTG

SEQ ID NO: 1593 - protein, 22 aa, Artificial Sequence
  Description of Artificial Sequence: Synthetic peptide
  MOD_RES (4)..(4): phosphoserine
HLPSPPLTQEVFFRKNLLRLTG

SEQ ID NO: 1594 - protein, 20 aa, Artificial Sequence
  Description of Artificial Sequence: Synthetic peptide
  MOD_RES (4)..(4): phosphoserine
HLSSFTMKLFFRKNLLRLTG

SEQ ID NO: 1595 - protein, 20 aa, Artificial Sequence
  Description of Artificial Sequence: Synthetic peptide
  MOD_RES (4)..(4): phosphoserine
HPISPYEHLFFRKNLLRLTG

SEQ ID NO: 1596 - protein, 21 aa, Artificial Sequence
  Description of Artificial Sequence: Synthetic peptide
  MOD_RES (4)..(4): phosphoserine
HPISPYEHLLFFRKNLLRLTG

SEQ ID NO: 1597 - protein, 20 aa, Artificial Sequence
  Description of Artificial Sequence: Synthetic peptide
  MOD_RES (4)..(4): phosphoserine
HPISSEELLFFRKNLLRLTG

SEQ ID NO: 1598 - protein, 20 aa, Artificial Sequence
  Description of Artificial Sequence: Synthetic peptide
  MOD_RES (5)..(5): phosphoserine
HPISSEELLFFRKNLLRLTG

SEQ ID NO: 1599 - protein, 24 aa, Artificial Sequence
  Description of Artificial Sequence: Synthetic peptide
  MOD_RES (4)..(4): phosphoserine
HPISSEELLSLKYFFRKNLLRLTG

SEQ ID NO: 1600 - protein, 24 aa, Artificial Sequence
  Description of Artificial Sequence: Synthetic peptide
  MOD_RES (5)..(5): phosphoserine
HPISSEELLSLKYFFRKNLLRLTG

SEQ ID NO: 1601 - protein, 26 aa, Artificial Sequence
  Description of Artificial Sequence: Synthetic peptide
  MOD_RES (8)..(8): phosphoserine
HPRPVPDSPVSVTRLFFRKNLLRLTG

SEQ ID NO: 1602 - protein, 23 aa, Artificial Sequence
  Description of Artificial Sequence: Synthetic peptide
  MOD_RES (4)..(4): phosphoserine
HPRSPNVLSVALFFRKNLLRLTG

SEQ ID NO: 1603 - protein, 20 aa, Artificial Sequence
  Description of Artificial Sequence: Synthetic peptide
  MOD_RES (3)..(3): phosphoserine
HPSLSAPALFFRKNLLRLTG

SEQ ID NO: 1604 - protein, 20 aa, Artificial Sequence
  Description of Artificial Sequence: Synthetic peptide
  MOD_RES (5)..(5): phosphoserine
HPSLSAPALFFRKNLLRLTG

SEQ ID NO: 1605 - protein, 20 aa, Artificial Sequence
  Description of Artificial Sequence: Synthetic peptide
  MOD_RES (8)..(8): phosphoserine
HPTLQAPSLFFRKNLLRLTG

SEQ ID NO: 1606 - protein, 21 aa, Artificial Sequence
  Description of Artificial Sequence: Synthetic peptide
  MOD_RES (6)..(6): phosphoserine
HPYRNSDPVIFFRKNLLRLTG

SEQ ID NO: 1607 - protein, 20 aa, Artificial Sequence
  Description of Artificial Sequence: Synthetic peptide
  MOD_RES (4)..(4): phosphoserine
  MOD_RES (9)..(9): oxidized tryptophan
HQFSLKENWFFRKNLLRLTG

SEQ ID NO: 1608 - protein, 20 aa, Artificial Sequence
  Description of Artificial Sequence: Synthetic peptide
  MOD_RES (8)..(8): phosphothreonine
HQGKFLQTFFFRKNLLRLTG

SEQ ID NO: 1609 - protein, 20 aa, Artificial Sequence
  Description of Artificial Sequence: Synthetic peptide
  MOD_RES (4)..(4): phosphoserine
HRASKVLFLFFRKNLLRLTG

SEQ ID NO: 1610 - protein, 21 aa, Artificial Sequence
  Description of Artificial Sequence: Synthetic peptide
  MOD_RES (4)..(4): phosphoserine
  MOD_RES (8)..(8): oxidized methionine
HRDSFSRMSLFFRKNLLRLTG

SEQ ID NO: 1611 - protein, 21 aa, Artificial Sequence
  Description of Artificial Sequence: Synthetic peptide
  MOD_RES (4)..(4): phosphoserine
HRDSFSRMSLFFRKNLLRLTG

SEQ ID NO: 1612 - protein, 20 aa, Artificial Sequence
  Description of Artificial Sequence: Synthetic peptide
  MOD_RES (4)..(4): phosphoserine
  MOD_RES (5)..(5): oxidized methionine
HRNSMKVFLFFRKNLLRLTG

SEQ ID NO: 1613 - protein, 20 aa, Artificial Sequence
  Description of Artificial Sequence: Synthetic peptide
  MOD_RES (4)..(4): phosphoserine
HRVSVILKLFFRKNLLRLTG

SEQ ID NO: 1614 - protein, 24 aa, Artificial Sequence
  Description of Artificial Sequence: Synthetic peptide
  MOD_RES (9)..(9): phosphoserine
HSDKRRPPSAELYFFRKNLLRLTG

SEQ ID NO: 1615 - protein, 22 aa, Artificial Sequence
  Description of Artificial Sequence: Synthetic peptide
  MOD_RES (4)..(4): phosphoserine
HSLSLDDIRLYFFRKNLLRLTG

SEQ ID NO: 1616 - protein, 20 aa, Artificial Sequence
  Description of Artificial Sequence: Synthetic peptide
  MOD_RES (4)..(4): phosphoserine
HSVSPDPVLFFRKNLLRLTG

SEQ ID NO: 1617 - protein, 20 aa, Artificial Sequence
  Description of Artificial Sequence: Synthetic peptide
  MOD_RES (4)..(4): phosphoserine
HTISPLDLAFFRKNLLRLTG

SEQ ID NO: 1618 - protein, 21 aa, Artificial Sequence
  Description of Artificial Sequence: Synthetic peptide
  MOD_RES (4)..(4): phosphoserine
HTISPLDLAKFFRKNLLRLTG

SEQ ID NO: 1619 - protein, 22 aa, Artificial Sequence
  Description of Artificial Sequence: Synthetic peptide
  MOD_RES (4)..(4): phosphoserine
HTISPLDLAKLFFRKNLLRLTG

SEQ ID NO: 1620 - protein, 20 aa, Artificial Sequence
  Description of Artificial Sequence: Synthetic peptide
  MOD_RES (4)..(4): phosphoserine
HTISPSFQLFFRKNLLRLTG

SEQ ID NO: 1621 - protein, 20 aa, Artificial Sequence
  Description of Artificial Sequence: Synthetic peptide
  MOD_RES (6)..(6): phosphoserine
HTISPSFQLFFRKNLLRLTG

SEQ ID NO: 1622 - protein, 21 aa, Artificial Sequence
  Description of Artificial Sequence: Synthetic peptide
  MOD_RES (8)..(8): phosphothreonine
HVSLITPTKRFFRKNLLRLTG

SEQ ID NO: 1623 - protein, 20 aa, Artificial Sequence
  Description of Artificial Sequence: Synthetic peptide
  MOD_RES (4)..(4): phosphoserine
HYFSPFRPYFFRKNLLRLTG

SEQ ID NO: 1624 - protein, 22 aa, Artificial Sequence
  Description of Artificial Sequence: Synthetic peptide
  MOD_RES (3)..(3): phosphoserine
HYSSRLGSAIFFFRKNLLRLTG

SEQ ID NO: 1625 - protein, 22 aa, Artificial Sequence
  Description of Artificial Sequence: Synthetic peptide
  MOD_RES (4)..(4): phosphoserine
HYSSRLGSAIFFFRKNLLRLTG

SEQ ID NO: 1626 - protein, 22 aa, Artificial Sequence
  Description of Artificial Sequence: Synthetic peptide
  MOD_RES (8)..(8): phosphoserine
HYSSRLGSAIFFFRKNLLRLTG

SEQ ID NO: 1627 - protein, 20 aa, Artificial Sequence
  Description of Artificial Sequence: Synthetic peptide
  MOD_RES (6)..(6): phosphoserine
IAATKSLSVFFRKNLLRLTG

SEQ ID NO: 1628 - protein, 20 aa, Artificial Sequence
  Description of Artificial Sequence: Synthetic peptide
  MOD_RES (8)..(8): phosphoserine
IEIERILSVFFRKNLLRLTG

SEQ ID NO: 1629 - protein, 20 aa, Artificial Sequence
  Description of Artificial Sequence: Synthetic peptide
  MOD_RES (8)..(8): phosphoserine
IFDLQKTSLFFRKNLLRLTG

SEQ ID NO: 1630 - protein, 23 aa, Artificial Sequence
  Description of Artificial Sequence: Synthetic peptide
  MOD_RES (4)..(4): phosphoserine
IIQSPSSTGLLKFFRKNLLRLTG

SEQ ID NO: 1631 - protein, 22 aa, Artificial Sequence
  Description of Artificial Sequence: Synthetic peptide
  MOD_RES (8)..(8): phosphoserine
ILGPPPPSFHLFFRKNLLRLTG

SEQ ID NO: 1632 - protein, 19 aa, Artificial Sequence
  Description of Artificial Sequence: Synthetic peptide
  MOD_RES (4)..(4): phosphothreonine
ILLTDLIIFFRKNLLRLTG

SEQ ID NO: 1633 - protein, 21 aa, Artificial Sequence
  Description of Artificial Sequence: Synthetic peptide
  MOD_RES (9)..(9): phosphotyrosine
IMKNLQAHYEFFRKNLLRLTG

SEQ ID NO: 1634 - protein, 19 aa, Artificial Sequence
  Description of Artificial Sequence: Synthetic peptide
  MOD_RES (7)..(7): phosphoserine
IPHQRSSLFFRKNLLRLTG

SEQ ID NO: 1635 - protein, 20 aa, Artificial Sequence
  Description of Artificial Sequence: Synthetic peptide
  MOD_RES (4)..(4): phosphoserine
IPKSKFLALFFRKNLLRLTG

SEQ ID NO: 1636 - protein, 20 aa, Artificial Sequence
  Description of Artificial Sequence: Synthetic peptide
  MOD_RES (4)..(4): phosphothreonine
IPMTPTSSFFFRKNLLRLTG

SEQ ID NO: 1637 - protein, 20 aa, Artificial Sequence
  Description of Artificial Sequence: Synthetic peptide
  MOD_RES (6)..(6): phosphothreonine
IPMTPTSSFFFRKNLLRLTG

SEQ ID NO: 1638 - protein, 20 aa, Artificial Sequence
  Description of Artificial Sequence: Synthetic peptide
  MOD_RES (6)..(6): phosphoserine
IPRPLSLIGFFRKNLLRLTG

SEQ ID NO: 1639 - protein, 21 aa, Artificial Sequence
  Description of Artificial Sequence: Synthetic peptide
  MOD_RES (4)..(4): phosphoserine
IPRSFRHLSFFFRKNLLRLTG

SEQ ID NO: 1640 - protein, 20 aa, Artificial Sequence
  Description of Artificial Sequence: Synthetic peptide
  MOD_RES (3)..(3): phosphoserine
  MOD_RES (4)..(4): oxidized methionine
IPSMSHVHLFFRKNLLRLTG

SEQ ID NO: 1641 - protein, 20 aa, Artificial Sequence
  Description of Artificial Sequence: Synthetic peptide
  MOD_RES (3)..(3): phosphoserine
IPSMSHVHLFFRKNLLRLTG

SEQ ID NO: 1642 - protein, 20 aa, Artificial Sequence
  Description of Artificial Sequence: Synthetic peptide
  MOD_RES (3)..(3): phosphoserine
  MOD_RES (9)..(9): oxidized methionine
IPSPLQPEMFFRKNLLRLTG

SEQ ID NO: 1643 - protein, 20 aa, Artificial Sequence
  Description of Artificial Sequence: Synthetic peptide
  MOD_RES (3)..(3): phosphoserine
IPSPLQPEMFFRKNLLRLTG

SEQ ID NO: 1644 - protein, 20 aa, Artificial Sequence
  Description of Artificial Sequence: Synthetic peptide
  MOD_RES (8)..(8): phosphoserine
IPVSKPLSLFFRKNLLRLTG

SEQ ID NO: 1645 - protein, 20 aa, Artificial Sequence
  Description of Artificial Sequence: Synthetic peptide
  MOD_RES (4)..(4): phosphoserine
IPVSRDWELFFRKNLLRLTG

SEQ ID NO: 1646 - protein, 20 aa, Artificial Sequence
  Description of Artificial Sequence: Synthetic peptide
  MOD_RES (8)..(8): phosphoserine
IRFGRKPSLFFRKNLLRLTG

SEQ ID NO: 1647 - protein, 20 aa, Artificial Sequence
  Description of Artificial Sequence: Synthetic peptide
  MOD_RES (4)..(4): phosphoserine
IRPSVLGPLFFRKNLLRLTG

SEQ ID NO: 1648 - protein, 20 aa, Artificial Sequence
  Description of Artificial Sequence: Synthetic peptide
  MOD_RES (4)..(4): phosphoserine
IRRSYFEVFFFRKNLLRLTG

SEQ ID NO: 1649 - protein, 19 aa, Artificial Sequence
  Description of Artificial Sequence: Synthetic peptide
  MOD_RES (7)..(7): phosphoserine
IRYSGHSLFFRKNLLRLTG

SEQ ID NO: 1650 - protein, 21 aa, Artificial Sequence
  Description of Artificial Sequence: Synthetic peptide
  MOD_RES (6)..(6): phosphoserine
ISKKLSFLSWFFRKNLLRLTG

SEQ ID NO: 1651 - protein, 20 aa, Artificial Sequence
  Description of Artificial Sequence: Synthetic peptide
  MOD_RES (8)..(8): phosphoserine
ISLDKLVSIFFRKNLLRLTG

SEQ ID NO: 1652 - protein, 20 aa, Artificial Sequence
  Description of Artificial Sequence: Synthetic peptide
  MOD_RES (2)..(2): phosphoserine
ISSLTTLSIFFRKNLLRLTG

SEQ ID NO: 1653 - protein, 20 aa, Artificial Sequence
  Description of Artificial Sequence: Synthetic peptide
  MOD_RES (3)..(3): phosphoserine
ISSLTTLSIFFRKNLLRLTG

SEQ ID NO: 1654 - protein, 20 aa, Artificial Sequence
  Description of Artificial Sequence: Synthetic peptide
  MOD_RES (3)..(3): phosphoserine
  MOD_RES (5)..(5): oxidized methionine
ISSSMHSLYFFRKNLLRLTG

SEQ ID NO: 1655 - protein, 20 aa, Artificial Sequence
  Description of Artificial Sequence: Synthetic peptide
  MOD_RES (3)..(3): phosphoserine
ISSSMHSLYFFRKNLLRLTG

SEQ ID NO: 1656 - protein, 20 aa, Artificial Sequence
  Description of Artificial Sequence: Synthetic peptide
  MOD_RES (4)..(4): phosphoserine
  MOD_RES (5)..(5): oxidized methionine
ISSSMHSLYFFRKNLLRLTG

SEQ ID NO: 1657 - protein, 20 aa, Artificial Sequence
  Description of Artificial Sequence: Synthetic peptide
  MOD_RES (4)..(4): phosphothreonine
ITITPPEKYFFRKNLLRLTG

SEQ ID NO: 1658 - protein, 21 aa, Artificial Sequence
  Description of Artificial Sequence: Synthetic peptide
  MOD_RES (5)..(5): phosphoserine
ITLLSPKHKYFFRKNLLRLTG

SEQ ID NO: 1659 - protein, 24 aa, Artificial Sequence
  Description of Artificial Sequence: Synthetic peptide
  MOD_RES (2)..(2): phosphothreonine
  MOD_RES (13)..(13): oxidized methionine
ITPPSSEKLVSVMFFRKNLLRLTG

SEQ ID NO: 1660 - protein, 24 aa, Artificial Sequence
  Description of Artificial Sequence: Synthetic peptide
  MOD_RES (2)..(2): phosphothreonine
ITPPSSEKLVSVMFFRKNLLRLTG

SEQ ID NO: 1661 - protein, 20 aa, Artificial Sequence
  Description of Artificial Sequence: Synthetic peptide
  MOD_RES (4)..(4): phosphoserine
ITTSPITVRFFRKNLLRLTG

SEQ ID NO: 1662 - protein, 21 aa, Artificial Sequence
  Description of Artificial Sequence: Synthetic peptide
  MOD_RES (4)..(4): phosphoserine
ITTSPITVRKFFRKNLLRLTG

SEQ ID NO: 1663 - protein, 20 aa, Artificial Sequence
  Description of Artificial Sequence: Synthetic peptide
  MOD_RES (4)..(4): phosphoserine
ITYSPKLERFFRKNLLRLTG

SEQ ID NO: 1664 - protein, 20 aa, Artificial Sequence
  Description of Artificial Sequence: Synthetic peptide
  MOD_RES (6)..(6): phosphoserine
IVLPLSLQRFFRKNLLRLTG

SEQ ID NO: 1665 - protein, 20 aa, Artificial Sequence
  Description of Artificial Sequence: Synthetic peptide
  MOD_RES (3)..(3): phosphoserine
IVSSLRLAYFFRKNLLRLTG

SEQ ID NO: 1666 - protein, 20 aa, Artificial Sequence
  Description of Artificial Sequence: Synthetic peptide
  MOD_RES (4)..(4): phosphoserine
IVSSLRLAYFFRKNLLRLTG

SEQ ID NO: 1667 - protein, 20 aa, Artificial Sequence
  Description of Artificial Sequence: Synthetic peptide
  MOD_RES (4)..(4): phosphoserine
IYDSVKVYFFFRKNLLRLTG

SEQ ID NO: 1668 - protein, 21 aa, Artificial Sequence
  Description of Artificial Sequence: Synthetic peptide
  MOD_RES (6)..(6): phosphoserine
IYRSQSPHYFFFRKNLLRLTG

SEQ ID NO: 1669 - protein, 24 aa, Artificial Sequence
  Description of Artificial Sequence: Synthetic peptide
  MOD_RES (4)..(4): phosphoserine
KAFSESGSNLHALFFRKNLLRLTG

SEQ ID NO: 1670 - protein, 21 aa, Artificial Sequence
  Description of Artificial Sequence: Synthetic peptide
  MOD_RES (4)..(4): phosphoserine
KAFSPVRSVRFFRKNLLRLTG

SEQ ID NO: 1671 - protein, 22 aa, Artificial Sequence
  Description of Artificial Sequence: Synthetic peptide
  MOD_RES (4)..(4): phosphoserine
KAFSPVRSVRKFFRKNLLRLTG

SEQ ID NO: 1672 - protein, 21 aa, Artificial Sequence
  Description of Artificial Sequence: Synthetic peptide
  MOD_RES (4)..(4): phosphothreonine
KAITPPQQPYFFRKNLLRLTG

SEQ ID NO: 1673 - protein, 21 aa, Artificial Sequence
  Description of Artificial Sequence: Synthetic peptide
  MOD_RES (4)..(4): phosphoserine
KASSPGHPAFFFRKNLLRLTG

SEQ ID NO: 1674 - protein, 20 aa, Artificial Sequence
  Description of Artificial Sequence: Synthetic peptide
  MOD_RES (4)..(4): phosphoserine
KAVSFHLVHFFRKNLLRLTG

SEQ ID NO: 1675 - protein, 18 aa, Artificial Sequence
  Description of Artificial Sequence: Synthetic peptide
  MOD_RES (4)..(4): phosphoserine
KAVSLFLFFRKNLLRLTG

SEQ ID NO: 1676 - protein, 22 aa, Artificial Sequence
  Description of Artificial Sequence: Synthetic peptide
  MOD_RES (4)..(4): phosphothreonine
KAYTPVVVTQWFFRKNLLRLTG

SEQ ID NO: 1677 - protein, 20 aa, Artificial Sequence
  Description of Artificial Sequence: Synthetic peptide
  MOD_RES (4)..(4): phosphoserine
KEDSFLQRYFFRKNLLRLTG

SEQ ID NO: 1678 - protein, 20 aa, Artificial Sequence
  Description of Artificial Sequence: Synthetic peptide
  MOD_RES (3)..(3): oxidized methionine
  MOD_RES (6)..(6): phosphothreonine
KEMSPTRQLFFRKNLLRLTG

SEQ ID NO: 1679 - protein, 20 aa, Artificial Sequence
  Description of Artificial Sequence: Synthetic peptide
  MOD_RES (3)..(3): phosphoserine
KESEVFYELFFRKNLLRLTG

SEQ ID NO: 1680 - protein, 20 aa, Artificial Sequence
  Description of Artificial Sequence: Synthetic peptide
  MOD_RES (3)..(3): phosphoserine
KESTLHLVLFFRKNLLRLTG

SEQ ID NO: 1681 - protein, 20 aa, Artificial Sequence
  Description of Artificial Sequence: Synthetic peptide
  MOD_RES (4)..(4): phosphothreonine
KESTLHLVLFFRKNLLRLTG

SEQ ID NO: 1682 - protein, 21 aa, Artificial Sequence
  Description of Artificial Sequence: Synthetic peptide
  MOD_RES (4)..(4): phosphoserine
KFLSPAQYLYFFRKNLLRLTG

SEQ ID NO: 1683 - protein, 21 aa, Artificial Sequence
  Description of Artificial Sequence: Synthetic peptide
  MOD_RES (6)..(6): phosphoserine
KFRDLSPPRYFFRKNLLRLTG

SEQ ID NO: 1684 - protein, 20 aa, Artificial Sequence
  Description of Artificial Sequence: Synthetic peptide
  MOD_RES (3)..(3): phosphoserine
KFSLRAAEFFFRKNLLRLTG

SEQ ID NO: 1685 - protein, 20 aa, Artificial Sequence
  Description of Artificial Sequence: Synthetic peptide
  MOD_RES (4)..(4): phosphoserine
KGFSGTFQLFFRKNLLRLTG

SEQ ID NO: 1686 - protein, 20 aa, Artificial Sequence
  Description of Artificial Sequence: Synthetic peptide
  MOD_RES (8)..(8): phosphoserine
KIFERATSFFFRKNLLRLTG

SEQ ID NO: 1687 - protein, 24 aa, Artificial Sequence
  Description of Artificial Sequence: Synthetic peptide
  MOD_RES (4)..(4): phosphoserine
KIFSKQQGKAFQRFFRKNLLRLTG

SEQ ID NO: 1688 - protein, 19 aa, Artificial Sequence
  Description of Artificial Sequence: Synthetic peptide
  MOD_RES (4)..(4): phosphoserine
KIISIFSGFFRKNLLRLTG

SEQ ID NO: 1689 - protein, 22 aa, Artificial Sequence
  Description of Artificial Sequence: Synthetic peptide
  MOD_RES (4)..(4): phosphoserine
KIISIFSGTEKFFRKNLLRLTG

SEQ ID NO: 1690 - protein, 21 aa, Artificial Sequence
  Description of Artificial Sequence: Synthetic peptide
  MOD_RES (4)..(4): phosphoserine
KIKSLEEIYLFFRKNLLRLTG

SEQ ID NO: 1691 - protein, 20 aa, Artificial Sequence
  Description of Artificial Sequence: Synthetic peptide
  MOD_RES (4)..(4): phosphoserine
KINSLAHLRFFRKNLLRLTG

SEQ ID NO: 1692 - protein, 20 aa, Artificial Sequence
  Description of Artificial Sequence: Synthetic peptide
  MOD_RES (4)..(4): phosphoserine
KISSFTSLKFFRKNLLRLTG

SEQ ID NO: 1693 - protein, 20 aa, Artificial Sequence
  Description of Artificial Sequence: Synthetic peptide
  MOD_RES (6)..(6): phosphothreonine
KISSFTSLKFFRKNLLRLTG

SEQ ID NO: 1694 - protein, 20 aa, Artificial Sequence
  Description of Artificial Sequence: Synthetic peptide
  MOD_RES (7)..(7): phosphoserine
KISSFTSLKFFRKNLLRLTG

SEQ ID NO: 1695 - protein, 20 aa, Artificial Sequence
  Description of Artificial Sequence: Synthetic peptide
  MOD_RES (4)..(4): phosphoserine
KISSLEIKLFFRKNLLRLTG

SEQ ID NO: 1696 - protein, 21 aa, Artificial Sequence
  Description of Artificial Sequence: Synthetic peptide
  MOD_RES (4)..(4): phosphoserine
KKLSLLNGGLFFRKNLLRLTG

SEQ ID NO: 1697 - protein, 20 aa, Artificial Sequence
  Description of Artificial Sequence: Synthetic peptide
  MOD_RES (8)..(8): phosphoserine
KLEGPDVSLFFRKNLLRLTG

SEQ ID NO: 1698 - protein, 21 aa, Artificial Sequence
  Description of Artificial Sequence: Synthetic peptide
  MOD_RES (6)..(6): phosphoserine
KLFHGSLEELFFRKNLLRLTG

SEQ ID NO: 1699 - protein, 21 aa, Artificial Sequence
  Description of Artificial Sequence: Synthetic peptide
  MOD_RES (6)..(6): phosphoserine
KLFPGSPAIYFFRKNLLRLTG

SEQ ID NO: 1700 - protein, 21 aa, Artificial Sequence
  Description of Artificial Sequence: Synthetic peptide
  MOD_RES (4)..(4): phosphoserine
KLHSLIGLGIFFRKNLLRLTG

SEQ ID NO: 1701 - protein, 22 aa, Artificial Sequence
  Description of Artificial Sequence: Synthetic peptide
  MOD_RES (8)..(8): phosphoserine
KLIDIVSSQKVFFRKNLLRLTG

SEQ ID NO: 1702 - protein, 20 aa, Artificial Sequence
  Description of Artificial Sequence: Synthetic peptide
  MOD_RES (4)..(4): phosphoserine
KLKSFTYEYFFRKNLLRLTG

SEQ ID NO: 1703 - protein, 22 aa, Artificial Sequence
  Description of Artificial Sequence: Synthetic peptide
  MOD_RES (7)..(7): phosphoserine
KLLDFGSLSNLFFRKNLLRLTG

SEQ ID NO: 1704 - protein, 23 aa, Artificial Sequence
  Description of Artificial Sequence: Synthetic peptide
  MOD_RES (11)..(11): phosphoserine
KLLEGEESRISLFFRKNLLRLTG

SEQ ID NO: 1705 - protein, 21 aa, Artificial Sequence
  Description of Artificial Sequence: Synthetic peptide
  MOD_RES (4)..(4): phosphoserine
KLLSPILARYFFRKNLLRLTG

SEQ ID NO: 1706 - protein, 20 aa, Artificial Sequence
  Description of Artificial Sequence: Synthetic peptide
  MOD_RES (4)..(4): phosphoserine
KLLSTALHVFFRKNLLRLTG

SEQ ID NO: 1707 - protein, 20 aa, Artificial Sequence
  Description of Artificial Sequence: Synthetic peptide
  MOD_RES (4)..(4): phosphoserine
KLLSYIQRLFFRKNLLRLTG

SEQ ID NO: 1708 - protein, 22 aa, Artificial Sequence
  Description of Artificial Sequence: Synthetic peptide
  MOD_RES (4)..(4): phosphoserine
KLMSDVEDVSLFFRKNLLRLTG

SEQ ID NO: 1709 - protein, 21 aa, Artificial Sequence
  Description of Artificial Sequence: Synthetic peptide
  MOD_RES (4)..(4): phosphoserine
KLMSLGDIRLFFRKNLLRLTG

SEQ ID NO: 1710 - protein, 22 aa, Artificial Sequence
  Description of Artificial Sequence: Synthetic peptide
  MOD_RES (3)..(3): oxidized methionine
  MOD_RES (4)..(4): phosphoserine
KLMSPKADVKLFFRKNLLRLTG

SEQ ID NO: 1711 - protein, 22 aa, Artificial Sequence
  Description of Artificial Sequence: Synthetic peptide
  MOD_RES (4)..(4): phosphoserine
KLMSPVLKQHLFFRKNLLRLTG

SEQ ID NO: 1712 - protein, 20 aa, Artificial Sequence
  Description of Artificial Sequence: Synthetic peptide
  MOD_RES (6)..(6): phosphoserine
KLQEFSKEEFFRKNLLRLTG

SEQ ID NO: 1713 - protein, 22 aa, Artificial Sequence
  Description of Artificial Sequence: Synthetic peptide
  MOD_RES (6)..(6): phosphothreonine
KLRIQTDGDKYFFRKNLLRLTG

SEQ ID NO: 1714 - protein, 21 aa, Artificial Sequence
  Description of Artificial Sequence: Synthetic peptide
  MOD_RES (4)..(4): phosphoserine
KLSSGLLPKLFFRKNLLRLTG

SEQ ID NO: 1715 - protein, 23 aa, Artificial Sequence
  Description of Artificial Sequence: Synthetic peptide
  MOD_RES (3)..(3): oxidized tryptophan
  MOD_RES (4)..(4): phosphothreonine
KLWTLVSEQTRVFFRKNLLRLTG

SEQ ID NO: 1716 - protein, 23 aa, Artificial Sequence
  Description of Artificial Sequence: Synthetic peptide
  MOD_RES (4)..(4): phosphothreonine
KLWTLVSEQTRVFFRKNLLRLTG

SEQ ID NO: 1717 - protein, 21 aa, Artificial Sequence
  Description of Artificial Sequence: Synthetic peptide
  MOD_RES (7)..(7): phosphoserine
KLYRPGSVAYFFRKNLLRLTG

SEQ ID NO: 1718 - protein, 20 aa, Artificial Sequence
  Description of Artificial Sequence: Synthetic peptide
  MOD_RES (4)..(4): phosphoserine
KLYSISSQVFFRKNLLRLTG

SEQ ID NO: 1719 - protein, 21 aa, Artificial Sequence
  Description of Artificial Sequence: Synthetic peptide
  MOD_RES (4)..(4): phosphoserine
KLYSPTSKALFFRKNLLRLTG

SEQ ID NO: 1720 - protein, 21 aa, Artificial Sequence
  Description of Artificial Sequence: Synthetic peptide
  MOD_RES (6)..(6): phosphothreonine
KLYSPTSKALFFRKNLLRLTG

SEQ ID NO: 1721 - protein, 20 aa, Artificial Sequence
  Description of Artificial Sequence: Synthetic peptide
  MOD_RES (5)..(5): phosphotyrosine
KLYTYIQSRFFRKNLLRLTG

SEQ ID NO: 1722 - protein, 21 aa, Artificial Sequence
  Description of Artificial Sequence: Synthetic peptide
  MOD_RES (5)..(5): phosphotyrosine
KLYTYIQSRFFFRKNLLRLTG

SEQ ID NO: 1723 - protein, 21 aa, Artificial Sequence
  Description of Artificial Sequence: Synthetic peptide
  MOD_RES (2)..(2): oxidized methionine
  MOD_RES (4)..(4): phosphoserine
KMDSFLDMQLFFRKNLLRLTG

SEQ ID NO: 1724 - protein, 21 aa, Artificial Sequence
  Description of Artificial Sequence: Synthetic peptide
  MOD_RES (4)..(4): phosphoserine
  MOD_RES (8)..(8): oxidized methionine
KMDSFLDMQLFFRKNLLRLTG

SEQ ID NO: 1725 - protein, 20 aa, Artificial Sequence
  Description of Artificial Sequence: Synthetic peptide
  MOD_RES (2)..(2): oxidized methionine
  MOD_RES (3)..(3): phosphoserine
KMSSYAFFVFFRKNLLRLTG

SEQ ID NO: 1726 - protein, 20 aa, Artificial Sequence
  Description of Artificial Sequence: Synthetic peptide
  MOD_RES (2)..(2): oxidized methionine
  MOD_RES (4)..(4): phosphoserine
KMSSYAFFVFFRKNLLRLTG

SEQ ID NO: 1727 - protein, 20 aa, Artificial Sequence
  Description of Artificial Sequence: Synthetic peptide
  MOD_RES (3)..(3): phosphoserine
KMSSYAFFVFFRKNLLRLTG

SEQ ID NO: 1728 - protein, 20 aa, Artificial Sequence
  Description of Artificial Sequence: Synthetic peptide
  MOD_RES (4)..(4): phosphoserine
KMSSYAFFVFFRKNLLRLTG

SEQ ID NO: 1729 - protein, 22 aa, Artificial Sequence
  Description of Artificial Sequence: Synthetic peptide
  MOD_RES (2)..(2): oxidized methionine
  MOD_RES (3)..(3): phosphoserine
KMSSYAFFVQTFFRKNLLRLTG

SEQ ID NO: 1730 - protein, 22 aa, Artificial Sequence
  Description of Artificial Sequence: Synthetic peptide
  MOD_RES (2)..(2): oxidized methionine
  MOD_RES (4)..(4): phosphoserine
KMSSYAFFVQTFFRKNLLRLTG

SEQ ID NO: 1731 - protein, 22 aa, Artificial Sequence
  Description of Artificial Sequence: Synthetic peptide
  MOD_RES (3)..(3): phosphoserine
KMSSYAFFVQTFFRKNLLRLTG

SEQ ID NO: 1732 - protein, 22 aa, Artificial Sequence
  Description of Artificial Sequence: Synthetic peptide
  MOD_RES (4)..(4): phosphoserine
KMSSYAFFVQTFFRKNLLRLTG

SEQ ID NO: 1733 - protein, 22 aa, Artificial Sequence
  Description of Artificial Sequence: Synthetic peptide
  MOD_RES (4)..(4): phosphoserine
KPASPARRLDLFFRKNLLRLTG

SEQ ID NO: 1734 - protein, 21 aa, Artificial Sequence
  Description of Artificial Sequence: Synthetic peptide
  MOD_RES (9)..(9): phosphoserine
KPDKTLRFSLFFRKNLLRLTG

SEQ ID NO: 1735 - protein, 22 aa, Artificial Sequence
  Description of Artificial Sequence: Synthetic peptide
  MOD_RES (4)..(4): phosphoserine
KPHSPVTGLYLFFRKNLLRLTG

SEQ ID NO: 1736 - protein, 20 aa, Artificial Sequence
  Description of Artificial Sequence: Synthetic peptide
  MOD_RES (4)..(4): phosphoserine
KPLSRVTSLFFRKNLLRLTG

SEQ ID NO: 1737 - protein, 20 aa, Artificial Sequence
  Description of Artificial Sequence: Synthetic peptide
  MOD_RES (4)..(4): phosphoserine
KPPSPGTVLFFRKNLLRLTG

SEQ ID NO: 1738 - protein, 20 aa, Artificial Sequence
  Description of Artificial Sequence: Synthetic peptide
  MOD_RES (7)..(7): phosphothreonine
KPPSPGTVLFFRKNLLRLTG

SEQ ID NO: 1739 - protein, 20 aa, Artificial Sequence
  Description of Artificial Sequence: Synthetic peptide
  MOD_RES (6)..(6): phosphoserine
  MOD_RES (7)..(7): oxidized methionine
KPRPLSMDLFFRKNLLRLTG

SEQ ID NO: 1740 - protein, 21 aa, Artificial Sequence
  Description of Artificial Sequence: Synthetic peptide
  MOD_RES (6)..(6): phosphoserine
KPRSISFPSAFFRKNLLRLTG

SEQ ID NO: 1741 - protein, 21 aa, Artificial Sequence
  Description of Artificial Sequence: Synthetic peptide
  MOD_RES (9)..(9): phosphothreonine
KPSSLRRVTIFFRKNLLRLTG

SEQ ID NO: 1742 - protein, 22 aa, Artificial Sequence
  Description of Artificial Sequence: Synthetic peptide
  MOD_RES (4)..(4): phosphoserine
KPSSPRGSLLLFFRKNLLRLTG

SEQ ID NO: 1743 - protein, 21 aa, Artificial Sequence
  Description of Artificial Sequence: Synthetic peptide
  MOD_RES (4)..(4): phosphoserine
KQKSLTNLSFFFRKNLLRLTG

SEQ ID NO: 1744 - protein, 21 aa, Artificial Sequence
  Description of Artificial Sequence: Synthetic peptide
  MOD_RES (6)..(6): phosphothreonine
KQKSLTNLSFFFRKNLLRLTG

SEQ ID NO: 1745 - protein, 20 aa, Artificial Sequence
  Description of Artificial Sequence: Synthetic peptide
  MOD_RES (4)..(4): phosphoserine
KRASALLNLFFRKNLLRLTG

SEQ ID NO: 1746 - protein, 20 aa, Artificial Sequence
  Description of Artificial Sequence: Synthetic peptide
  MOD_RES (4)..(4): phosphoserine
KRASYELEFFFRKNLLRLTG

SEQ ID NO: 1747 - protein, 21 aa, Artificial Sequence
  Description of Artificial Sequence: Synthetic peptide
  MOD_RES (4)..(4): phosphoserine
KRDSFIGTPYFFRKNLLRLTG

SEQ ID NO: 1748 - protein, 20 aa, Artificial Sequence
  Description of Artificial Sequence: Synthetic peptide
  MOD_RES (4)..(4): phosphoserine
KRFSLDFNLFFRKNLLRLTG

SEQ ID NO: 1749 - protein, 20 aa, Artificial Sequence
  Description of Artificial Sequence: Synthetic peptide
  MOD_RES (4)..(4): phosphoserine
KRISIFLSMFFRKNLLRLTG

SEQ ID NO: 1750 - protein, 23 aa, Artificial Sequence
  Description of Artificial Sequence: Synthetic peptide
  MOD_RES (4)..(4): phosphoserine
KRISISTSGGSFFFRKNLLRLTG

SEQ ID NO: 1751 - protein, 21 aa, Artificial Sequence
  Description of Artificial Sequence: Synthetic peptide
  MOD_RES (5)..(5): phosphoserine
KRLGSLVDEFFFRKNLLRLTG

SEQ ID NO: 1752 - protein, 22 aa, Artificial Sequence
  Description of Artificial Sequence: Synthetic peptide
  MOD_RES (4)..(4): phosphoserine
KRLSVELTSSLFFRKNLLRLTG

SEQ ID NO: 1753 - protein, 23 aa, Artificial Sequence
  Description of Artificial Sequence: Synthetic peptide
  MOD_RES (4)..(4): phosphoserine
KRLSVELTSSLFFFRKNLLRLTG

SEQ ID NO: 1754 - protein, 22 aa, Artificial Sequence
  Description of Artificial Sequence: Synthetic peptide
  MOD_RES (4)..(4): phosphoserine
KRLSVERIYQKFFRKNLLRLTG

SEQ ID NO: 1755 - protein, 20 aa, Artificial Sequence
  Description of Artificial Sequence: Synthetic peptide
  MOD_RES (4)..(4): phosphoserine
KRMSFVMEYFFRKNLLRLTG

SEQ ID NO: 1756 - protein, 20 aa, Artificial Sequence
  Description of Artificial Sequence: Synthetic peptide
  MOD_RES (4)..(4): phosphoserine
KRNSDLLLLFFRKNLLRLTG

SEQ ID NO: 1757 - protein, 21 aa, Artificial Sequence
  Description of Artificial Sequence: Synthetic peptide
  MOD_RES (4)..(4): phosphoserine
KRPSSEDFVFFFRKNLLRLTG

SEQ ID NO: 1758 - protein, 22 aa, Artificial Sequence
  Description of Artificial Sequence: Synthetic peptide
  MOD_RES (4)..(4): phosphoserine
KRPSSEDFVFLFFRKNLLRLTG

SEQ ID NO: 1759 - protein, 22 aa, Artificial Sequence
  Description of Artificial Sequence: Synthetic peptide
  MOD_RES (5)..(5): phosphoserine
KRPSSEDFVFLFFRKNLLRLTG

SEQ ID NO: 1760 - protein, 20 aa, Artificial Sequence
  Description of Artificial Sequence: Synthetic peptide
  MOD_RES (4)..(4): phosphothreonine
KRRTGALVLFFRKNLLRLTG

SEQ ID NO: 1761 - protein, 20 aa, Artificial Sequence
  Description of Artificial Sequence: Synthetic peptide
  MOD_RES (4)..(4): phosphoserine
KRSSISQLLFFRKNLLRLTG

SEQ ID NO: 1762 - protein, 20 aa, Artificial Sequence
  Description of Artificial Sequence: Synthetic peptide
  MOD_RES (4)..(4): phosphoserine
KRVSTFQEFFFRKNLLRLTG

SEQ ID NO: 1763 - protein, 20 aa, Artificial Sequence
  Description of Artificial Sequence: Synthetic peptide
  MOD_RES (4)..(4): phosphothreonine
KRVTWIVEFFFRKNLLRLTG

SEQ ID NO: 1764 - protein, 19 aa, Artificial Sequence
  Description of Artificial Sequence: Synthetic peptide
  MOD_RES (7)..(7): phosphoserine
KRYLFRSFFFRKNLLRLTG

SEQ ID NO: 1765 - protein, 20 aa, Artificial Sequence
  Description of Artificial Sequence: Synthetic peptide
  MOD_RES (4)..(4): phosphoserine
KRYSRSLTIFFRKNLLRLTG

SEQ ID NO: 1766 - protein, 20 aa, Artificial Sequence
  Description of Artificial Sequence: Synthetic peptide
  MOD_RES (4)..(4): phosphoserine
KSASFAFEFFFRKNLLRLTG

SEQ ID NO: 1767 - protein, 20 aa, Artificial Sequence
  Description of Artificial Sequence: Synthetic peptide
  MOD_RES (5)..(5): phosphoserine
KSDGSFIGYFFRKNLLRLTG

SEQ ID NO: 1768 - protein, 22 aa, Artificial Sequence
  Description of Artificial Sequence: Synthetic peptide
  MOD_RES (4)..(4): phosphoserine
KSFSAPATQAYFFRKNLLRLTG

SEQ ID NO: 1769 - protein, 20 aa, Artificial Sequence
  Description of Artificial Sequence: Synthetic peptide
  MOD_RES (8)..(8): phosphothreonine
  MOD_RES (9)..(9): oxidized tryptophan
KSGELLATWFFRKNLLRLTG

SEQ ID NO: 1770 - protein, 20 aa, Artificial Sequence
  Description of Artificial Sequence: Synthetic peptide
  MOD_RES (8)..(8): phosphothreonine
KSGEPLSTWFFRKNLLRLTG

SEQ ID NO: 1771 - protein, 20 aa, Artificial Sequence
  Description of Artificial Sequence: Synthetic peptide
  MOD_RES (4)..(4): phosphoserine
KSKSIEITFFFRKNLLRLTG

SEQ ID NO: 1772 - protein, 21 aa, Artificial Sequence
  Description of Artificial Sequence: Synthetic peptide
  MOD_RES (2)..(2): phosphoserine
  MOD_RES (9)..(9): oxidized methionine
KSLPSDQVMLFFRKNLLRLTG

SEQ ID NO: 1773 - protein, 21 aa, Artificial Sequence
  Description of Artificial Sequence: Synthetic peptide
  MOD_RES (2)..(2): phosphoserine
KSLPSDQVMLFFRKNLLRLTG

SEQ ID NO: 1774 - protein, 22 aa, Artificial Sequence
  Description of Artificial Sequence: Synthetic peptide
  MOD_RES (4)..(4): phosphoserine
KSLSIEIGHEVFFRKNLLRLTG

SEQ ID NO: 1775 - protein, 21 aa, Artificial Sequence
  Description of Artificial Sequence: Synthetic peptide
  MOD_RES (6)..(6): phosphoserine
KSLSPSLLGYFFRKNLLRLTG

SEQ ID NO: 1776 - protein, 24 aa, Artificial Sequence
  Description of Artificial Sequence: Synthetic peptide
  MOD_RES (11)..(11): phosphoserine
KSSEEKRLSISKFFFRKNLLRLTG

SEQ ID NO: 1777 - protein, 20 aa, Artificial Sequence
  Description of Artificial Sequence: Synthetic peptide
  MOD_RES (4)..(4): phosphoserine
KSSSLPRAFFFRKNLLRLTG

SEQ ID NO: 1778 - protein, 21 aa, Artificial Sequence
  Description of Artificial Sequence: Synthetic peptide
  MOD_RES (4)..(4): phosphothreonine
KSVTPTKEFLFFRKNLLRLTG

SEQ ID NO: 1779 - protein, 22 aa, Artificial Sequence
  Description of Artificial Sequence: Synthetic peptide
  MOD_RES (4)..(4): phosphoserine
KTDSDSDLQLYFFRKNLLRLTG

SEQ ID NO: 1780 - protein, 23 aa, Artificial Sequence
  Description of Artificial Sequence: Synthetic peptide
  MOD_RES (4)..(4): phosphoserine
KTISESDLNHSFFFRKNLLRLTG

SEQ ID NO: 1781 - protein, 21 aa, Artificial Sequence
  Description of Artificial Sequence: Synthetic peptide
  MOD_RES (4)..(4): phosphoserine
KTISPKSTVYFFRKNLLRLTG

SEQ ID NO: 1782 - protein, 20 aa, Artificial Sequence
  Description of Artificial Sequence: Synthetic peptide
  MOD_RES (4)..(4): phosphoserine
KTKSMFFFLFFRKNLLRLTG

SEQ ID NO: 1783 - protein, 20 aa, Artificial Sequence
  Description of Artificial Sequence: Synthetic peptide
  MOD_RES (4)..(4): phosphoserine
KTLSLVKELFFRKNLLRLTG

SEQ ID NO: 1784 - protein, 20 aa, Artificial Sequence
  Description of Artificial Sequence: Synthetic peptide
  MOD_RES (3)..(3): oxidized methionine
  MOD_RES (4)..(4): phosphoserine
KTMSGTFLLFFRKNLLRLTG

SEQ ID NO: 1785 - protein, 20 aa, Artificial Sequence
  Description of Artificial Sequence: Synthetic peptide
  MOD_RES (3)..(3): oxidized methionine
  MOD_RES (6)..(6): phosphothreonine
KTMSGTFLLFFRKNLLRLTG

SEQ ID NO: 1786 - protein, 20 aa, Artificial Sequence
  Description of Artificial Sequence: Synthetic peptide
  MOD_RES (6)..(6): phosphothreonine
KTMSGTFLLFFRKNLLRLTG

SEQ ID NO: 1787 - protein, 22 aa, Artificial Sequence
  Description of Artificial Sequence: Synthetic peptide
  MOD_RES (3)..(3): oxidized methionine
  MOD_RES (4)..(4): phosphoserine
KTMSGTFLLRFFFRKNLLRLTG

SEQ ID NO: 1788 - protein, 22 aa, Artificial Sequence
  Description of Artificial Sequence: Synthetic peptide
  MOD_RES (4)..(4): phosphoserine
KTMSGTFLLRFFFRKNLLRLTG

SEQ ID NO: 1789 - protein, 21 aa, Artificial Sequence
  Description of Artificial Sequence: Synthetic peptide
  MOD_RES (2)..(2): phosphothreonine
KTMSPSQMIMFFRKNLLRLTG

SEQ ID NO: 1790 - protein, 20 aa, Artificial Sequence
  Description of Artificial Sequence: Synthetic peptide
  MOD_RES (6)..(6): phosphoserine
KTQRVSLLFFFRKNLLRLTG

SEQ ID NO: 1791 - protein, 22 aa, Artificial Sequence
  Description of Artificial Sequence: Synthetic peptide
  MOD_RES (2)..(2): phosphothreonine
KTRSLSVEIVYFFRKNLLRLTG

SEQ ID NO: 1792 - protein, 22 aa, Artificial Sequence
  Description of Artificial Sequence: Synthetic peptide
  MOD_RES (4)..(4): phosphoserine
KTRSLSVEIVYFFRKNLLRLTG

SEQ ID NO: 1793 - protein, 22 aa, Artificial Sequence
  Description of Artificial Sequence: Synthetic peptide
  MOD_RES (4)..(4): phosphoserine
KTVSPPIRKGWFFRKNLLRLTG

SEQ ID NO: 1794 - protein, 22 aa, Artificial Sequence
  Description of Artificial Sequence: Synthetic peptide
  MOD_RES (4)..(4): phosphoserine
KTVSSTKLVSFFFRKNLLRLTG

SEQ ID NO: 1795 - protein, 21 aa, Artificial Sequence
  Description of Artificial Sequence: Synthetic peptide
  MOD_RES (9)..(9): phosphoserine
KVDGPRSPSYFFRKNLLRLTG

SEQ ID NO: 1796 - protein, 21 aa, Artificial Sequence
  Description of Artificial Sequence: Synthetic peptide
  MOD_RES (4)..(4): phosphoserine
  MOD_RES (10)..(10): oxidized tryptophan
KVESPPLEEWFFRKNLLRLTG

SEQ ID NO: 1797 - protein, 20 aa, Artificial Sequence
  Description of Artificial Sequence: Synthetic peptide
  MOD_RES (4)..(4): phosphoserine
KVFSLPTQLFFRKNLLRLTG

SEQ ID NO: 1798 - protein, 22 aa, Artificial Sequence
  Description of Artificial Sequence: Synthetic peptide
  MOD_RES (4)..(4): phosphoserine
KVFSPVIRSSFFFRKNLLRLTG

SEQ ID NO: 1799 - protein, 21 aa, Artificial Sequence
  Description of Artificial Sequence: Synthetic peptide
  MOD_RES (4)..(4): phosphoserine
KVGSFKFIYVFFRKNLLRLTG

SEQ ID NO: 1800 - protein, 20 aa, Artificial Sequence
  Description of Artificial Sequence: Synthetic peptide
  MOD_RES (4)..(4): phosphoserine
  MOD_RES (5)..(5): oxidized tryptophan
  MOD_RES (9)..(9): oxidized methionine
KVLSWPFLMFFRKNLLRLTG

SEQ ID NO: 1801 - protein, 20 aa, Artificial Sequence
  Description of Artificial Sequence: Synthetic peptide
  MOD_RES (4)..(4): phosphoserine
  MOD_RES (5)..(5): oxidized tryptophan
KVLSWPFLMFFRKNLLRLTG

SEQ ID NO: 1802 - protein, 21 aa, Artificial Sequence
  Description of Artificial Sequence: Synthetic peptide
  MOD_RES (4)..(4): phosphoserine
KWPSKRRIPVFFRKNLLRLTG

SEQ ID NO: 1803 - protein, 21 aa, Artificial Sequence
  Description of Artificial Sequence: Synthetic peptide
  MOD_RES (4)..(4): phosphoserine
KYRSVISDIFFFRKNLLRLTG

SEQ ID NO: 1804 - protein, 22 aa, Artificial Sequence
  Description of Artificial Sequence: Synthetic peptide
  MOD_RES (5)..(5): phosphoserine
LAFPSPEKLLRFFRKNLLRLTG

SEQ ID NO: 1805 - protein, 21 aa, Artificial Sequence
  Description of Artificial Sequence: Synthetic peptide
  MOD_RES (3)..(3): phosphoserine
LASDRCSIHLFFRKNLLRLTG

SEQ ID NO: 1806 - protein, 21 aa, Artificial Sequence
  Description of Artificial Sequence: Synthetic peptide
  MOD_RES (6)..(6): phosphoserine
LEIKESILSLFFRKNLLRLTG

SEQ ID NO: 1807 - protein, 20 aa, Artificial Sequence
  Description of Artificial Sequence: Synthetic peptide
  MOD_RES (4)..(4): phosphoserine
LEISPDNSLFFRKNLLRLTG

SEQ ID NO: 1808 - protein, 20 aa, Artificial Sequence
  Description of Artificial Sequence: Synthetic peptide
  MOD_RES (4)..(4): phosphoserine
LEISVGKSVFFRKNLLRLTG

SEQ ID NO: 1809 - protein, 20 aa, Artificial Sequence
  Description of Artificial Sequence: Synthetic peptide
  MOD_RES (3)..(3): phosphoserine
LESPTTPLLFFRKNLLRLTG

SEQ ID NO: 1810 - protein, 20 aa, Artificial Sequence
  Description of Artificial Sequence: Synthetic peptide
  MOD_RES (5)..(5): phosphothreonine
LESPTTPLLFFRKNLLRLTG

SEQ ID NO: 1811 - protein, 20 aa, Artificial Sequence
  Description of Artificial Sequence: Synthetic peptide
  MOD_RES (6)..(6): phosphothreonine
LESPTTPLLFFRKNLLRLTG

SEQ ID NO: 1812 - protein, 21 aa, Artificial Sequence
  Description of Artificial Sequence: Synthetic peptide
  MOD_RES (7)..(7): phosphoserine
  MOD_RES (9)..(9): oxidized methionine
LGFEVKSKMVFFRKNLLRLTG

SEQ ID NO: 1813 - protein, 21 aa, Artificial Sequence
  Description of Artificial Sequence: Synthetic peptide
  MOD_RES (7)..(7): phosphoserine
LGFEVKSKMVFFRKNLLRLTG

SEQ ID NO: 1814 - protein, 20 aa, Artificial Sequence
  Description of Artificial Sequence: Synthetic peptide
  MOD_RES (3)..(3): oxidized methionine
  MOD_RES (7)..(7): phosphoserine
LGMEVLSGVFFRKNLLRLTG

SEQ ID NO: 1815 - protein, 20 aa, Artificial Sequence
  Description of Artificial Sequence: Synthetic peptide
  MOD_RES (7)..(7): phosphoserine
LGMEVLSGVFFRKNLLRLTG

SEQ ID NO: 1816 - protein, 20 aa, Artificial Sequence
  Description of Artificial Sequence: Synthetic peptide
  MOD_RES (6)..(6): phosphothreonine
LIPDHTIRAFFRKNLLRLTG

SEQ ID NO: 1817 - protein, 19 aa, Artificial Sequence
  Description of Artificial Sequence: Synthetic peptide
  MOD_RES (7)..(7): phosphoserine
LLDIIRSLFFRKNLLRLTG

SEQ ID NO: 1818 - protein, 21 aa, Artificial Sequence
  Description of Artificial Sequence: Synthetic peptide
  MOD_RES (9)..(9): phosphothreonine
LLDPRSYHTYFFRKNLLRLTG

SEQ ID NO: 1819 - protein, 19 aa, Artificial Sequence
  Description of Artificial Sequence: Synthetic peptide
  MOD_RES (3)..(3): phosphoserine
LLSPKHKYFFRKNLLRLTG

SEQ ID NO: 1820 - protein, 22 aa, Artificial Sequence
  Description of Artificial Sequence: Synthetic peptide
  MOD_RES (4)..(4): phosphoserine
LPASPRARLSAFFRKNLLRLTG

SEQ ID NO: 1821 - protein, 20 aa, Artificial Sequence
  Description of Artificial Sequence: Synthetic peptide
  MOD_RES (4)..(4): phosphoserine
LPASPSVSLFFRKNLLRLTG

SEQ ID NO: 1822 - protein, 20 aa, Artificial Sequence
  Description of Artificial Sequence: Synthetic peptide
  MOD_RES (6)..(6): phosphoserine
LPASPSVSLFFRKNLLRLTG

SEQ ID NO: 1823 - protein, 20 aa, Artificial Sequence
  Description of Artificial Sequence: Synthetic peptide
  MOD_RES (6)..(6): phosphoserine
LPDPGSPRLFFRKNLLRLTG

SEQ ID NO: 1824 - protein, 20 aa, Artificial Sequence
  Description of Artificial Sequence: Synthetic peptide
  MOD_RES (4)..(4): phosphoserine
LPESPRLTLFFRKNLLRLTG

SEQ ID NO: 1825 - protein, 22 aa, Artificial Sequence
  Description of Artificial Sequence: Synthetic peptide
  MOD_RES (10)..(10): phosphoserine
LPFSGPREPSLFFRKNLLRLTG

SEQ ID NO: 1826 - protein, 22 aa, Artificial Sequence
  Description of Artificial Sequence: Synthetic peptide
  MOD_RES (5)..(5): phosphoserine
LPFSSSPSRSAFFRKNLLRLTG

SEQ ID NO: 1827 - protein, 22 aa, Artificial Sequence
  Description of Artificial Sequence: Synthetic peptide
  MOD_RES (6)..(6): phosphoserine
LPFSSSPSRSAFFRKNLLRLTG

SEQ ID NO: 1828 - protein, 22 aa, Artificial Sequence
  Description of Artificial Sequence: Synthetic peptide
  MOD_RES (4)..(4): phosphoserine
LPLSSSHLNVYFFRKNLLRLTG

SEQ ID NO: 1829 - protein, 22 aa, Artificial Sequence
  Description of Artificial Sequence: Synthetic peptide
  MOD_RES (5)..(5): phosphoserine
LPLSSSHLNVYFFRKNLLRLTG

SEQ ID NO: 1830 - protein, 22 aa, Artificial Sequence
  Description of Artificial Sequence: Synthetic peptide
  MOD_RES (6)..(6): phosphoserine
LPLSSSHLNVYFFRKNLLRLTG

SEQ ID NO: 1831 - protein, 21 aa, Artificial Sequence
  Description of Artificial Sequence: Synthetic peptide
  MOD_RES (5)..(5): phosphoserine
LPPVSPLKAAFFRKNLLRLTG

SEQ ID NO: 1832 - protein, 22 aa, Artificial Sequence
  Description of Artificial Sequence: Synthetic peptide
  MOD_RES (6)..(6): phosphoserine
LPRGLSPARQLFFRKNLLRLTG

SEQ ID NO: 1833 - protein, 21 aa, Artificial Sequence
  Description of Artificial Sequence: Synthetic peptide
  MOD_RES (8)..(8): phosphoserine
LPRGSSPSVLFFRKNLLRLTG

SEQ ID NO: 1834 - protein, 21 aa, Artificial Sequence
  Description of Artificial Sequence: Synthetic peptide
  MOD_RES (6)..(6): phosphoserine
LPRPLSPTKLFFRKNLLRLTG

SEQ ID NO: 1835 - protein, 21 aa, Artificial Sequence
  Description of Artificial Sequence: Synthetic peptide
  MOD_RES (8)..(8): phosphothreonine
LPRPLSPTKLFFRKNLLRLTG

SEQ ID NO: 1836 - protein, 22 aa, Artificial Sequence
  Description of Artificial Sequence: Synthetic peptide
  MOD_RES (6)..(6): phosphoserine
LPRRLSDSPVFFFRKNLLRLTG

SEQ ID NO: 1837 - protein, 22 aa, Artificial Sequence
  Description of Artificial Sequence: Synthetic peptide
  MOD_RES (8)..(8): phosphoserine
LPRRLSDSPVFFFRKNLLRLTG

SEQ ID NO: 1838 - protein, 21 aa, Artificial Sequence
  Description of Artificial Sequence: Synthetic peptide
  MOD_RES (4)..(4): phosphoserine
LPRSPPLKVLFFRKNLLRLTG

SEQ ID NO: 1839 - protein, 20 aa, Artificial Sequence
  Description of Artificial Sequence: Synthetic peptide
  MOD_RES (4)..(4): phosphoserine
LPRSSRGLLFFRKNLLRLTG

SEQ ID NO: 1840 - protein, 20 aa, Artificial Sequence
  Description of Artificial Sequence: Synthetic peptide
  MOD_RES (5)..(5): phosphoserine
LPRSSRGLLFFRKNLLRLTG

SEQ ID NO: 1841 - protein, 22 aa, Artificial Sequence
  Description of Artificial Sequence: Synthetic peptide
  MOD_RES (6)..(6): phosphoserine
  MOD_RES (7)..(7): oxidized methionine
LPRSSSMAAGLFFRKNLLRLTG

SEQ ID NO: 1842 - protein, 20 aa, Artificial Sequence
  Description of Artificial Sequence: Synthetic peptide
  MOD_RES (8)..(8): phosphoserine
LPSARPLSLFFRKNLLRLTG

SEQ ID NO: 1843 - protein, 19 aa, Artificial Sequence
  Description of Artificial Sequence: Synthetic peptide
  MOD_RES (3)..(3): phosphoserine
  MOD_RES (8)..(8): cysteinylated cysteine
LPSRLTKCFFRKNLLRLTG

SEQ ID NO: 1844 - protein, 19 aa, Artificial Sequence
  Description of Artificial Sequence: Synthetic peptide
  MOD_RES (4)..(4): phosphoserine
  MOD_RES (8)..(8): oxidized methionine
LPTSPLAMFFRKNLLRLTG

SEQ ID NO: 1845 - protein, 21 aa, Artificial Sequence
  Description of Artificial Sequence: Synthetic peptide
  MOD_RES (3)..(3): phosphothreonine
  MOD_RES (8)..(8): oxidized methionine
LPTSPLAMEYFFRKNLLRLTG

SEQ ID NO: 1846 - protein, 21 aa, Artificial Sequence
  Description of Artificial Sequence: Synthetic peptide
  MOD_RES (3)..(3): phosphothreonine
LPTSPLAMEYFFRKNLLRLTG

SEQ ID NO: 1847 - protein, 21 aa, Artificial Sequence
  Description of Artificial Sequence: Synthetic peptide
  MOD_RES (4)..(4): phosphoserine
  MOD_RES (8)..(8): oxidized methionine
LPTSPLAMEYFFRKNLLRLTG

SEQ ID NO: 1848 - protein, 21 aa, Artificial Sequence
  Description of Artificial Sequence: Synthetic peptide
  MOD_RES (4)..(4): phosphoserine
LPTSPLAMEYFFRKNLLRLTG

SEQ ID NO: 1849 - protein, 21 aa, Artificial Sequence
  Description of Artificial Sequence: Synthetic peptide
  MOD_RES (4)..(4): phosphoserine
LPVSPGHRKTFFRKNLLRLTG

SEQ ID NO: 1850 - protein, 22 aa, Artificial Sequence
  Description of Artificial Sequence: Synthetic peptide
  MOD_RES (6)..(6): phosphoserine
LPYPVSPKQKYFFRKNLLRLTG

SEQ ID NO: 1851 - protein, 21 aa, Artificial Sequence
  Description of Artificial Sequence: Synthetic peptide
  MOD_RES (6)..(6): phosphoserine
LQHSFSFAGFFFRKNLLRLTG

SEQ ID NO: 1852 - protein, 20 aa, Artificial Sequence
  Description of Artificial Sequence: Synthetic peptide
  MOD_RES (4)..(4): phosphoserine
LQISPVSSYFFRKNLLRLTG

SEQ ID NO: 1853 - protein, 20 aa, Artificial Sequence
  Description of Artificial Sequence: Synthetic peptide
  MOD_RES (4)..(4): phosphoserine
  MOD_RES (9)..(9): oxidized tryptophan
LSKSSATLWFFRKNLLRLTG

SEQ ID NO: 1854 - protein, 20 aa, Artificial Sequence
  Description of Artificial Sequence: Synthetic peptide
  MOD_RES (4)..(4): phosphothreonine
LSPTKLPSIFFRKNLLRLTG

SEQ ID NO: 1855 - protein, 20 aa, Artificial Sequence
  Description of Artificial Sequence: Synthetic peptide
  MOD_RES (7)..(7): phosphoserine
LSRTFKSLFFFRKNLLRLTG

SEQ ID NO: 1856 - protein, 20 aa, Artificial Sequence
  Description of Artificial Sequence: Synthetic peptide
  MOD_RES (2)..(2): phosphoserine
LSSSVIRELFFRKNLLRLTG

SEQ ID NO: 1857 - protein, 20 aa, Artificial Sequence
  Description of Artificial Sequence: Synthetic peptide
  MOD_RES (3)..(3): phosphoserine
LSSSVIRELFFRKNLLRLTG

SEQ ID NO: 1858 - protein, 20 aa, Artificial Sequence
  Description of Artificial Sequence: Synthetic peptide
  MOD_RES (4)..(4): phosphoserine
LTASQILSRFFRKNLLRLTG

SEQ ID NO: 1859 - protein, 23 aa, Artificial Sequence
  Description of Artificial Sequence: Synthetic peptide
  MOD_RES (5)..(5): phosphoserine
LTDPSSPTISSYFFRKNLLRLTG

SEQ ID NO: 1860 - protein, 23 aa, Artificial Sequence
  Description of Artificial Sequence: Synthetic peptide
  MOD_RES (8)..(8): phosphothreonine
LTDPSSPTISSYFFRKNLLRLTG

SEQ ID NO: 1861 - protein, 19 aa, Artificial Sequence
  Description of Artificial Sequence: Synthetic peptide
  MOD_RES (4)..(4): phosphothreonine
LTKTLIKLFFRKNLLRLTG

SEQ ID NO: 1862 - protein, 20 aa, Artificial Sequence
  Description of Artificial Sequence: Synthetic peptide
  MOD_RES (4)..(4): phosphoserine
LVASPRLEKFFRKNLLRLTG

SEQ ID NO: 1863 - protein, 22 aa, Artificial Sequence
  Description of Artificial Sequence: Synthetic peptide
  MOD_RES (7)..(7): phosphoserine
  MOD_RES (10)..(10): cysteinylated cysteine
LVREPGSQACLFFRKNLLRLTG

SEQ ID NO: 1864 - protein, 22 aa, Artificial Sequence
  Description of Artificial Sequence: Synthetic peptide
  MOD_RES (1)..(1): oxidized methionine
  MOD_RES (4)..(4): phosphoserine
MIISPERLDPFFFRKNLLRLTG

SEQ ID NO: 1865 - protein, 22 aa, Artificial Sequence
  Description of Artificial Sequence: Synthetic peptide
  MOD_RES (4)..(4): phosphoserine
MIISPERLDPFFFRKNLLRLTG

SEQ ID NO: 1866 - protein, 20 aa, Artificial Sequence
  Description of Artificial Sequence: Synthetic peptide
  MOD_RES (4)..(4): phosphoserine
MLPSPNEKLFFRKNLLRLTG

SEQ ID NO: 1867 - protein, 20 aa, Artificial Sequence
  Description of Artificial Sequence: Synthetic peptide
  MOD_RES (8)..(8): phosphothreonine
MPFPAHLTYFFRKNLLRLTG

SEQ ID NO: 1868 - protein, 20 aa, Artificial Sequence
  Description of Artificial Sequence: Synthetic peptide
  MOD_RES (1)..(1): oxidized methionine
  MOD_RES (4)..(4): phosphoserine
MPHSPTLRVFFRKNLLRLTG

SEQ ID NO: 1869 - protein, 20 aa, Artificial Sequence
  Description of Artificial Sequence: Synthetic peptide
  MOD_RES (1)..(1): oxidized methionine
  MOD_RES (6)..(6): phosphothreonine
MPHSPTLRVFFRKNLLRLTG

SEQ ID NO: 1870 - protein, 20 aa, Artificial Sequence
  Description of Artificial Sequence: Synthetic peptide
  MOD_RES (4)..(4): phosphoserine
MPHSPTLRVFFRKNLLRLTG

SEQ ID NO: 1871 - protein, 20 aa, Artificial Sequence
  Description of Artificial Sequence: Synthetic peptide
  MOD_RES (6)..(6): phosphothreonine
MPHSPTLRVFFRKNLLRLTG

SEQ ID NO: 1872 - protein, 20 aa, Artificial Sequence
  Description of Artificial Sequence: Synthetic peptide
  MOD_RES (8)..(8): phosphoserine
MPKFRMPSLFFRKNLLRLTG

SEQ ID NO: 1873 - protein, 20 aa, Artificial Sequence
  Description of Artificial Sequence: Synthetic peptide
  MOD_RES (7)..(7): phosphoserine
MPQDLRSPAFFRKNLLRLTG

SEQ ID NO: 1874 - protein, 21 aa, Artificial Sequence
  Description of Artificial Sequence: Synthetic peptide
  MOD_RES (1)..(1): oxidized methionine
  MOD_RES (6)..(6): phosphoserine
MPREPSATRLFFRKNLLRLTG

SEQ ID NO: 1875 - protein, 21 aa, Artificial Sequence
  Description of Artificial Sequence: Synthetic peptide
  MOD_RES (1)..(1): oxidized methionine
  MOD_RES (6)..(6): phosphoserine
MPRQPSATRLFFRKNLLRLTG

SEQ ID NO: 1876 - protein, 22 aa, Artificial Sequence
  Description of Artificial Sequence: Synthetic peptide
  MOD_RES (1)..(1): oxidized methionine
  MOD_RES (3)..(3): phosphoserine
MPSPATLSHSLFFRKNLLRLTG

SEQ ID NO: 1877 - protein, 22 aa, Artificial Sequence
  Description of Artificial Sequence: Synthetic peptide
  MOD_RES (3)..(3): phosphoserine
MPSPATLSHSLFFRKNLLRLTG

SEQ ID NO: 1878 - protein, 21 aa, Artificial Sequence
  Description of Artificial Sequence: Synthetic peptide
  MOD_RES (3)..(3): phosphoserine
MPSPFRSSALFFRKNLLRLTG

SEQ ID NO: 1879 - protein, 21 aa, Artificial Sequence
  Description of Artificial Sequence: Synthetic peptide
  MOD_RES (1)..(1): oxidized methionine
  MOD_RES (3)..(3): phosphoserine
MPSPGGRITLFFRKNLLRLTG

SEQ ID NO: 1880 - protein, 21 aa, Artificial Sequence
  Description of Artificial Sequence: Synthetic peptide
  MOD_RES (3)..(3): phosphoserine
MPSPGGRITLFFRKNLLRLTG

SEQ ID NO: 1881 - protein, 22 aa, Artificial Sequence
  Description of Artificial Sequence: Synthetic peptide
  MOD_RES (3)..(3): phosphoserine
MPSPIMHPLILFFRKNLLRLTG

SEQ ID NO: 1882 - protein, 22 aa, Artificial Sequence
  Description of Artificial Sequence: Synthetic peptide
  MOD_RES (3)..(3): phosphoserine
MPSPLKGQHTLFFRKNLLRLTG

SEQ ID NO: 1883 - protein, 22 aa, Artificial Sequence
  Description of Artificial Sequence: Synthetic peptide
  MOD_RES (3)..(3): phosphoserine
MPSPSTLKKELFFRKNLLRLTG

SEQ ID NO: 1884 - protein, 20 aa, Artificial Sequence
  Description of Artificial Sequence: Synthetic peptide
  MOD_RES (1)..(1): oxidized methionine
  MOD_RES (3)..(3): phosphoserine
MPSPVSPKLFFRKNLLRLTG

SEQ ID NO: 1885 - protein, 20 aa, Artificial Sequence
  Description of Artificial Sequence: Synthetic peptide
  MOD_RES (1)..(1): oxidized methionine
  MOD_RES (6)..(6): phosphoserine
MPSPVSPKLFFRKNLLRLTG

SEQ ID NO: 1886 - protein, 20 aa, Artificial Sequence
  Description of Artificial Sequence: Synthetic peptide
  MOD_RES (3)..(3): phosphoserine
MPSPVSPKLFFRKNLLRLTG

SEQ ID NO: 1887 - protein, 20 aa, Artificial Sequence
  Description of Artificial Sequence: Synthetic peptide
  MOD_RES (6)..(6): phosphoserine
MPSPVSPKLFFRKNLLRLTG

SEQ ID NO: 1888 - protein, 20 aa, Artificial Sequence
  Description of Artificial Sequence: Synthetic peptide
  MOD_RES (3)..(3): phosphothreonine
MPTSPGVDLFFRKNLLRLTG

SEQ ID NO: 1889 - protein, 20 aa, Artificial Sequence
  Description of Artificial Sequence: Synthetic peptide
  MOD_RES (4)..(4): phosphoserine
MPTSPGVDLFFRKNLLRLTG

SEQ ID NO: 1890 - protein, 20 aa, Artificial Sequence
  Description of Artificial Sequence: Synthetic peptide
  MOD_RES (1)..(1): oxidized methionine
  MOD_RES (4)..(4): phosphoserine
MRLSRELQLFFRKNLLRLTG

SEQ ID NO: 1891 - protein, 19 aa, Artificial Sequence
  Description of Artificial Sequence: Synthetic peptide
  MOD_RES (8)..(8): phosphothreonine
MSKLINHTFFRKNLLRLTG

SEQ ID NO: 1892 - protein, 20 aa, Artificial Sequence
  Description of Artificial Sequence: Synthetic peptide
  MOD_RES (1)..(1): oxidized methionine
  MOD_RES (5)..(5): phosphoserine
MTKSSPLKIFFRKNLLRLTG

SEQ ID NO: 1893 - protein, 19 aa, Artificial Sequence
  Description of Artificial Sequence: Synthetic peptide
  MOD_RES (4)..(4): phosphoserine
NAISLPTIFFRKNLLRLTG

SEQ ID NO: 1894 - protein, 22 aa, Artificial Sequence
  Description of Artificial Sequence: Synthetic peptide
  MOD_RES (4)..(4): phosphoserine
NAVSPSSGPSLFFRKNLLRLTG

SEQ ID NO: 1895 - protein, 21 aa, Artificial Sequence
  Description of Artificial Sequence: Synthetic peptide
  MOD_RES (4)..(4): phosphoserine
NAWSPVMRARFFRKNLLRLTG

SEQ ID NO: 1896 - protein, 21 aa, Artificial Sequence
  Description of Artificial Sequence: Synthetic peptide
  MOD_RES (4)..(4): phosphothreonine
NHVTPPNVSLFFRKNLLRLTG

SEQ ID NO: 1897 - protein, 20 aa, Artificial Sequence
  Description of Artificial Sequence: Synthetic peptide
  MOD_RES (4)..(4): phosphoserine
NIPSFIVRLFFRKNLLRLTG

SEQ ID NO: 1898 - protein, 23 aa, Artificial Sequence
  Description of Artificial Sequence: Synthetic peptide
  MOD_RES (4)..(4): phosphoserine
  MOD_RES (9)..(9): oxidized methionine
NLLSPDGKMISVFFRKNLLRLTG

SEQ ID NO: 1899 - protein, 20 aa, Artificial Sequence
  Description of Artificial Sequence: Synthetic peptide
  MOD_RES (2)..(2): oxidized methionine
  MOD_RES (4)..(4): phosphoserine
NMDSPGPMLFFRKNLLRLTG

SEQ ID NO: 1900 - protein, 20 aa, Artificial Sequence
  Description of Artificial Sequence: Synthetic peptide
  MOD_RES (4)..(4): phosphoserine
  MOD_RES (8)..(8): oxidized methionine
NMDSPGPMLFFRKNLLRLTG

SEQ ID NO: 1901 - protein, 21 aa, Artificial Sequence
  Description of Artificial Sequence: Synthetic peptide
  MOD_RES (5)..(5): phosphoserine
NPIHSPSYPLFFRKNLLRLTG

SEQ ID NO: 1902 - protein, 21 aa, Artificial Sequence
  Description of Artificial Sequence: Synthetic peptide
  MOD_RES (7)..(7): phosphoserine
NPIHSPSYPLFFRKNLLRLTG

SEQ ID NO: 1903 - protein, 20 aa, Artificial Sequence
  Description of Artificial Sequence: Synthetic peptide
  MOD_RES (3)..(3): phosphoserine
  MOD_RES (9)..(9): oxidized methionine
NPSSPEFFMFFRKNLLRLTG

SEQ ID NO: 1904 - protein, 20 aa, Artificial Sequence
  Description of Artificial Sequence: Synthetic peptide
  MOD_RES (3)..(3): phosphoserine
NPSSPEFFMFFRKNLLRLTG

SEQ ID NO: 1905 - protein, 20 aa, Artificial Sequence
  Description of Artificial Sequence: Synthetic peptide
  MOD_RES (4)..(4): phosphoserine
  MOD_RES (9)..(9): oxidized methionine
NPSSPEFFMFFRKNLLRLTG

SEQ ID NO: 1906 - protein, 20 aa, Artificial Sequence
  Description of Artificial Sequence: Synthetic peptide
  MOD_RES (4)..(4): phosphoserine
NPSSPEFFMFFRKNLLRLTG

SEQ ID NO: 1907 - protein, 21 aa, Artificial Sequence
  Description of Artificial Sequence: Synthetic peptide
  MOD_RES (4)..(4): phosphoserine
NQGSPFKSALFFRKNLLRLTG

SEQ ID NO: 1908 - protein, 20 aa, Artificial Sequence
  Description of Artificial Sequence: Synthetic peptide
  MOD_RES (4)..(4): phosphoserine
NRESFQIFLFFRKNLLRLTG

SEQ ID NO: 1909 - protein, 23 aa, Artificial Sequence
  Description of Artificial Sequence: Synthetic peptide
  MOD_RES (4)..(4): phosphoserine
NRFSGGFGARDYFFRKNLLRLTG

SEQ ID NO: 1910 - protein, 20 aa, Artificial Sequence
  Description of Artificial Sequence: Synthetic peptide
  MOD_RES (4)..(4): phosphoserine
NRFSPKASLFFRKNLLRLTG

SEQ ID NO: 1911 - protein, 20 aa, Artificial Sequence
  Description of Artificial Sequence: Synthetic peptide
  MOD_RES (4)..(4): phosphoserine
NRHSLPFSLFFRKNLLRLTG

SEQ ID NO: 1912 - protein, 20 aa, Artificial Sequence
  Description of Artificial Sequence: Synthetic peptide
  MOD_RES (4)..(4): phosphoserine
NRHSLVEKLFFRKNLLRLTG

SEQ ID NO: 1913 - protein, 20 aa, Artificial Sequence
  Description of Artificial Sequence: Synthetic peptide
  MOD_RES (4)..(4): phosphoserine
NRLSLLVQKFFRKNLLRLTG

SEQ ID NO: 1914 - protein, 20 aa, Artificial Sequence
  Description of Artificial Sequence: Synthetic peptide
  MOD_RES (4)..(4): phosphoserine
NRMSRRIVLFFRKNLLRLTG

SEQ ID NO: 1915 - protein, 27 aa, Artificial Sequence
  Description of Artificial Sequence: Synthetic peptide
  MOD_RES (10)..(10): phosphoserine
NRSLHINNISPGNTISFFRKNLLRLTG

SEQ ID NO: 1916 - protein, 20 aa, Artificial Sequence
  Description of Artificial Sequence: Synthetic peptide
  MOD_RES (4)..(4): phosphoserine
NRSSPVHIIFFRKNLLRLTG

SEQ ID NO: 1917 - protein, 20 aa, Artificial Sequence
  Description of Artificial Sequence: Synthetic peptide
  MOD_RES (8)..(8): phosphoserine
NSISSVVSRFFRKNLLRLTG

SEQ ID NO: 1918 - protein, 20 aa, Artificial Sequence
  Description of Artificial Sequence: Synthetic peptide
  MOD_RES (4)..(4): phosphoserine
NSLSPRSSLFFRKNLLRLTG

SEQ ID NO: 1919 - protein, 20 aa, Artificial Sequence
  Description of Artificial Sequence: Synthetic peptide
  MOD_RES (4)..(4): phosphoserine
NSVSPSESLFFRKNLLRLTG

SEQ ID NO: 1920 - protein, 20 aa, Artificial Sequence
  Description of Artificial Sequence: Synthetic peptide
  MOD_RES (4)..(4): phosphoserine
NVLSPLPSQFFRKNLLRLTG

SEQ ID NO: 1921 - protein, 22 aa, Artificial Sequence
  Description of Artificial Sequence: Synthetic peptide
  MOD_RES (4)..(4): phosphoserine
NVLSPLPSQAMFFRKNLLRLTG

SEQ ID NO: 1922 - protein, 20 aa, Artificial Sequence
  Description of Artificial Sequence: Synthetic peptide
  MOD_RES (8)..(8): phosphoserine
NVMKRKFSLFFRKNLLRLTG

SEQ ID NO: 1923 - protein, 21 aa, Artificial Sequence
  Description of Artificial Sequence: Synthetic peptide
  MOD_RES (6)..(6): phosphoserine
PEFPLSPPKKFFRKNLLRLTG

SEQ ID NO: 1924 - protein, 20 aa, Artificial Sequence
  Description of Artificial Sequence: Synthetic peptide
  MOD_RES (4)..(4): phosphoserine
PEVSPRPALFFRKNLLRLTG

SEQ ID NO: 1925 - protein, 19 aa, Artificial Sequence
  Description of Artificial Sequence: Synthetic peptide
  MOD_RES (7)..(7): phosphoserine
PIFSRLSIFFRKNLLRLTG

SEQ ID NO: 1926 - protein, 19 aa, Artificial Sequence
  Description of Artificial Sequence: Synthetic peptide
  MOD_RES (7)..(7): phosphoserine
PVSKPLSLFFRKNLLRLTG

SEQ ID NO: 1927 - protein, 20 aa, Artificial Sequence
  Description of Artificial Sequence: Synthetic peptide
  MOD_RES (4)..(4): phosphoserine
QEASPRPLLFFRKNLLRLTG

SEQ ID NO: 1928 - protein, 20 aa, Artificial Sequence
  Description of Artificial Sequence: Synthetic peptide
  MOD_RES (4)..(4): phosphothreonine
QLMTLENKLFFRKNLLRLTG

SEQ ID NO: 1929 - protein, 22 aa, Artificial Sequence
  Description of Artificial Sequence: Synthetic peptide
  MOD_RES (4)..(4): phosphoserine
QLPSPTATSQLFFRKNLLRLTG

SEQ ID NO: 1930 - protein, 25 aa, Artificial Sequence
  Description of Artificial Sequence: Synthetic peptide
  MOD_RES (9)..(9): phosphoserine
QPRNSLPASPAHQLFFRKNLLRLTG

SEQ ID NO: 1931 - protein, 21 aa, Artificial Sequence
  Description of Artificial Sequence: Synthetic peptide
  MOD_RES (6)..(6): phosphoserine
QPRTPSPLVLFFRKNLLRLTG

SEQ ID NO: 1932 - protein, 20 aa, Artificial Sequence
  Description of Artificial Sequence: Synthetic peptide
  MOD_RES (5)..(5): phosphoserine
QRVPSYDSFFFRKNLLRLTG

SEQ ID NO: 1933 - protein, 23 aa, Artificial Sequence
  Description of Artificial Sequence: Synthetic peptide
  MOD_RES (4)..(4): phosphoserine
QSISFSGLPSGRFFRKNLLRLTG

SEQ ID NO: 1934 - protein, 20 aa, Artificial Sequence
  Description of Artificial Sequence: Synthetic peptide
  MOD_RES (4)..(4): phosphoserine
QSSSWTRVFFFRKNLLRLTG

SEQ ID NO: 1935 - protein, 20 aa, Artificial Sequence
  Description of Artificial Sequence: Synthetic peptide
  MOD_RES (4)..(4): phosphoserine
QTISPLSTYFFRKNLLRLTG

SEQ ID NO: 1936 - protein, 21 aa, Artificial Sequence
  Description of Artificial Sequence: Synthetic peptide
  MOD_RES (6)..(6): phosphothreonine
QTPDFTPTKYFFRKNLLRLTG

SEQ ID NO: 1937 - protein, 20 aa, Artificial Sequence
  Description of Artificial Sequence: Synthetic peptide
  MOD_RES (4)..(4): phosphoserine
QTPSPRLALFFRKNLLRLTG

SEQ ID NO: 1938 - protein, 21 aa, Artificial Sequence
  Description of Artificial Sequence: Synthetic peptide
  MOD_RES (6)..(6): phosphoserine
QTRRPSYLEWFFRKNLLRLTG

SEQ ID NO: 1939 - protein, 20 aa, Artificial Sequence
  Description of Artificial Sequence: Synthetic peptide
  MOD_RES (4)..(4): phosphoserine
RAASIENVLFFRKNLLRLTG

SEQ ID NO: 1940 - protein, 22 aa, Artificial Sequence
  Description of Artificial Sequence: Synthetic peptide
  MOD_RES (4)..(4): phosphoserine
  MOD_RES (11)..(11): oxidized tryptophan
RAASSPDGFFWFFRKNLLRLTG

SEQ ID NO: 1941 - protein, 22 aa, Artificial Sequence
  Description of Artificial Sequence: Synthetic peptide
  MOD_RES (5)..(5): phosphoserine
  MOD_RES (11)..(11): oxidized tryptophan
RAASSPDGFFWFFRKNLLRLTG

SEQ ID NO: 1942 - protein, 20 aa, Artificial Sequence
  Description of Artificial Sequence: Synthetic peptide
  MOD_RES (4)..(4): phosphothreonine
RAATPLPSLFFRKNLLRLTG

SEQ ID NO: 1943 - protein, 21 aa, Artificial Sequence
  Description of Artificial Sequence: Synthetic peptide
  MOD_RES (4)..(4): phosphothreonine
RAATPTLTTFFFRKNLLRLTG

SEQ ID NO: 1944 - protein, 21 aa, Artificial Sequence
  Description of Artificial Sequence: Synthetic peptide
  MOD_RES (6)..(6): phosphothreonine
RAATPTLTTFFFRKNLLRLTG

SEQ ID NO: 1945 - protein, 20 aa, Artificial Sequence
  Description of Artificial Sequence: Synthetic peptide
  MOD_RES (4)..(4): phosphoserine
RAGSFSRFYFFRKNLLRLTG

SEQ ID NO: 1946 - protein, 22 aa, Artificial Sequence
  Description of Artificial Sequence: Synthetic peptide
  MOD_RES (4)..(4): phosphothreonine
  MOD_RES (11)..(11): oxidized methionine
RAHTPTPGIYMFFRKNLLRLTG

SEQ ID NO: 1947 - protein, 22 aa, Artificial Sequence
  Description of Artificial Sequence: Synthetic peptide
  MOD_RES (4)..(4): phosphothreonine
RAHTPTPGIYMFFRKNLLRLTG

SEQ ID NO: 1948 - protein, 22 aa, Artificial Sequence
  Description of Artificial Sequence: Synthetic peptide
  MOD_RES (6)..(6): phosphothreonine
RAHTPTPGIYMFFRKNLLRLTG

SEQ ID NO: 1949 - protein, 20 aa, Artificial Sequence
  Description of Artificial Sequence: Synthetic peptide
  MOD_RES (4)..(4): phosphoserine
RALSHADLFFFRKNLLRLTG

SEQ ID NO: 1950 - protein, 20 aa, Artificial Sequence
  Description of Artificial Sequence: Synthetic peptide
  MOD_RES (4)..(4): phosphoserine
RALSLTRALFFRKNLLRLTG

SEQ ID NO: 1951 - protein, 22 aa, Artificial Sequence
  Description of Artificial Sequence: Synthetic peptide
  MOD_RES (4)..(4): phosphoserine
RANSFVGTAQYFFRKNLLRLTG

SEQ ID NO: 1952 - protein, 21 aa, Artificial Sequence
  Description of Artificial Sequence: Synthetic peptide
  MOD_RES (4)..(4): phosphoserine
RAPSYRTLELFFRKNLLRLTG

SEQ ID NO: 1953 - protein, 21 aa, Artificial Sequence
  Description of Artificial Sequence: Synthetic peptide
  MOD_RES (4)..(4): phosphoserine
RARSPVLWGWFFRKNLLRLTG

SEQ ID NO: 1954 - protein, 21 aa, Artificial Sequence
  Description of Artificial Sequence: Synthetic peptide
  MOD_RES (3)..(3): phosphoserine
RASSLNFLNKFFRKNLLRLTG

SEQ ID NO: 1955 - protein, 21 aa, Artificial Sequence
  Description of Artificial Sequence: Synthetic peptide
  MOD_RES (4)..(4): phosphoserine
RASSLNFLNKFFRKNLLRLTG

SEQ ID NO: 1956 - protein, 20 aa, Artificial Sequence
  Description of Artificial Sequence: Synthetic peptide
  MOD_RES (3)..(3): phosphothreonine
  MOD_RES (9)..(9): oxidized methionine
RATSNVFAMFFRKNLLRLTG

SEQ ID NO: 1957 - protein, 20 aa, Artificial Sequence
  Description of Artificial Sequence: Synthetic peptide
  MOD_RES (3)..(3): phosphothreonine
RATSNVFAMFFRKNLLRLTG

SEQ ID NO: 1958 - protein, 20 aa, Artificial Sequence
  Description of Artificial Sequence: Synthetic peptide
  MOD_RES (4)..(4): phosphoserine
  MOD_RES (9)..(9): oxidized methionine
RATSNVFAMFFRKNLLRLTG

SEQ ID NO: 1959 - protein, 20 aa, Artificial Sequence
  Description of Artificial Sequence: Synthetic peptide
  MOD_RES (4)..(4): phosphoserine
RATSNVFAMFFRKNLLRLTG

SEQ ID NO: 1960 - protein, 21 aa, Artificial Sequence
  Description of Artificial Sequence: Synthetic peptide
  MOD_RES (3)..(3): phosphothreonine
  MOD_RES (9)..(9): oxidized methionine
RATSNVFAMFFFRKNLLRLTG

SEQ ID NO: 1961 - protein, 21 aa, Artificial Sequence
  Description of Artificial Sequence: Synthetic peptide
  MOD_RES (3)..(3): phosphothreonine
RATSNVFAMFFFRKNLLRLTG

SEQ ID NO: 1962 - protein, 21 aa, Artificial Sequence
  Description of Artificial Sequence: Synthetic peptide
  MOD_RES (4)..(4): phosphoserine
  MOD_RES (9)..(9): oxidized methionine
RATSNVFAMFFFRKNLLRLTG

SEQ ID NO: 1963 - protein, 21 aa, Artificial Sequence
  Description of Artificial Sequence: Synthetic peptide
  MOD_RES (4)..(4): phosphoserine
RATSNVFAMFFFRKNLLRLTG

SEQ ID NO: 1964 - protein, 21 aa, Artificial Sequence
  Description of Artificial Sequence: Synthetic peptide
  MOD_RES (4)..(4): phosphoserine
RATSPLVSLYFFRKNLLRLTG

SEQ ID NO: 1965 - protein, 20 aa, Artificial Sequence
  Description of Artificial Sequence: Synthetic peptide
  MOD_RES (4)..(4): phosphoserine
RAVSPFAKIFFRKNLLRLTG

SEQ ID NO: 1966 - protein, 21 aa, Artificial Sequence
  Description of Artificial Sequence: Synthetic peptide
  MOD_RES (4)..(4): phosphoserine
  MOD_RES (10)..(10): oxidized methionine
RAVSPHFDDMFFRKNLLRLTG

SEQ ID NO: 1967 - protein, 21 aa, Artificial Sequence
  Description of Artificial Sequence: Synthetic peptide
  MOD_RES (4)..(4): phosphoserine
RAVSPHFDDMFFRKNLLRLTG

SEQ ID NO: 1968 - protein, 24 aa, Artificial Sequence
  Description of Artificial Sequence: Synthetic peptide
  MOD_RES (4)..(4): phosphoserine
RAYSPLHGGSGSYFFRKNLLRLTG

SEQ ID NO: 1969 - protein, 19 aa, Artificial Sequence
  Description of Artificial Sequence: Synthetic peptide
  MOD_RES (5)..(5): phosphoserine
  MOD_RES (8)..(8): oxidized methionine
REAPSPLMFFRKNLLRLTG

SEQ ID NO: 1970 - protein, 19 aa, Artificial Sequence
  Description of Artificial Sequence: Synthetic peptide
  MOD_RES (5)..(5): phosphoserine
REAPSPLMFFRKNLLRLTG

SEQ ID NO: 1971 - protein, 21 aa, Artificial Sequence
  Description of Artificial Sequence: Synthetic peptide
  MOD_RES (4)..(4): phosphoserine
  MOD_RES (10)..(10): oxidized methionine
REASIELPSMFFRKNLLRLTG

SEQ ID NO: 1972 - protein, 20 aa, Artificial Sequence
  Description of Artificial Sequence: Synthetic peptide
  MOD_RES (4)..(4): phosphoserine
REDSLEFSLFFRKNLLRLTG

SEQ ID NO: 1973 - protein, 20 aa, Artificial Sequence
  Description of Artificial Sequence: Synthetic peptide
  MOD_RES (8)..(8): phosphoserine
REDSLEFSLFFRKNLLRLTG

SEQ ID NO: 1974 - protein, 24 aa, Artificial Sequence
  Description of Artificial Sequence: Synthetic peptide
  MOD_RES (8)..(8): phosphothreonine
REFSGPSTPTGTLFFRKNLLRLTG

SEQ ID NO: 1975 - protein, 24 aa, Artificial Sequence
  Description of Artificial Sequence: Synthetic peptide
  MOD_RES (10)..(10): phosphothreonine
REFSGPSTPTGTLFFRKNLLRLTG

SEQ ID NO: 1976 - protein, 21 aa, Artificial Sequence
  Description of Artificial Sequence: Synthetic peptide
  MOD_RES (4)..(4): oxidized methionine
  MOD_RES (6)..(6): phosphothreonine
REIMGTPEYLFFRKNLLRLTG

SEQ ID NO: 1977 - protein, 21 aa, Artificial Sequence
  Description of Artificial Sequence: Synthetic peptide
  MOD_RES (4)..(4): phosphoserine
RELSAPARLYFFRKNLLRLTG

SEQ ID NO: 1978 - protein, 22 aa, Artificial Sequence
  Description of Artificial Sequence: Synthetic peptide
  MOD_RES (4)..(4): phosphoserine
RELSGTIKEILFFRKNLLRLTG

SEQ ID NO: 1979 - protein, 21 aa, Artificial Sequence
  Description of Artificial Sequence: Synthetic peptide
  MOD_RES (4)..(4): phosphoserine
  MOD_RES (10)..(10): oxidized methionine
RELSPSSLKMFFRKNLLRLTG

SEQ ID NO: 1980 - protein, 21 aa, Artificial Sequence
  Description of Artificial Sequence: Synthetic peptide
  MOD_RES (4)..(4): phosphoserine
RELSPVSFQYFFRKNLLRLTG

SEQ ID NO: 1981 - protein, 22 aa, Artificial Sequence
  Description of Artificial Sequence: Synthetic peptide
  MOD_RES (4)..(4): phosphoserine
REPSESSPLALFFRKNLLRLTG

SEQ ID NO: 1982 - protein, 22 aa, Artificial Sequence
  Description of Artificial Sequence: Synthetic peptide
  MOD_RES (7)..(7): phosphoserine
REPSESSPLALFFRKNLLRLTG

SEQ ID NO: 1983 - protein, 22 aa, Artificial Sequence
  Description of Artificial Sequence: Synthetic peptide
  MOD_RES (4)..(4): phosphoserine
REPSPLPELALFFRKNLLRLTG

SEQ ID NO: 1984 - protein, 22 aa, Artificial Sequence
  Description of Artificial Sequence: Synthetic peptide
  MOD_RES (4)..(4): phosphoserine
REPSPVRYDNLFFRKNLLRLTG

SEQ ID NO: 1985 - protein, 20 aa, Artificial Sequence
  Description of Artificial Sequence: Synthetic peptide
  MOD_RES (6)..(6): phosphoserine
RERAFSVKFFFRKNLLRLTG

SEQ ID NO: 1986 - protein, 20 aa, Artificial Sequence
  Description of Artificial Sequence: Synthetic peptide
  MOD_RES (3)..(3): phosphoserine
RESPIPIEIFFRKNLLRLTG

SEQ ID NO: 1987 - protein, 20 aa, Artificial Sequence
  Description of Artificial Sequence: Synthetic peptide
  MOD_RES (3)..(3): phosphoserine
RESPRPLQLFFRKNLLRLTG

SEQ ID NO: 1988 - protein, 20 aa, Artificial Sequence
  Description of Artificial Sequence: Synthetic peptide
  MOD_RES (4)..(4): phosphoserine
RESSLGFQLFFRKNLLRLTG

SEQ ID NO: 1989 - protein, 21 aa, Artificial Sequence
  Description of Artificial Sequence: Synthetic peptide
  MOD_RES (7)..(7): phosphoserine
RETNLDSLPLFFRKNLLRLTG

SEQ ID NO: 1990 - protein, 20 aa, Artificial Sequence
  Description of Artificial Sequence: Synthetic peptide
  MOD_RES (4)..(4): phosphoserine
RETSMVHELFFRKNLLRLTG

SEQ ID NO: 1991 - protein, 21 aa, Artificial Sequence
  Description of Artificial Sequence: Synthetic peptide
  MOD_RES (4)..(4): phosphoserine
RETSPNRIGLFFRKNLLRLTG

SEQ ID NO: 1992 - protein, 20 aa, Artificial Sequence
  Description of Artificial Sequence: Synthetic peptide
  MOD_RES (4)..(4): phosphoserine
REVSPEPIVFFRKNLLRLTG

SEQ ID NO: 1993 - protein, 20 aa, Artificial Sequence
  Description of Artificial Sequence: Synthetic peptide
  MOD_RES (4)..(4): phosphoserine
  MOD_RES (5)..(5): oxidized methionine
RFQSMPVRLFFRKNLLRLTG

SEQ ID NO: 1994 - protein, 20 aa, Artificial Sequence
  Description of Artificial Sequence: Synthetic peptide
  MOD_RES (4)..(4): phosphoserine
RFQSMPVRLFFRKNLLRLTG

SEQ ID NO: 1995 - protein, 20 aa, Artificial Sequence
  Description of Artificial Sequence: Synthetic peptide
  MOD_RES (4)..(4): phosphoserine
RHKSDSISLFFRKNLLRLTG

SEQ ID NO: 1996 - protein, 20 aa, Artificial Sequence
  Description of Artificial Sequence: Synthetic peptide
  MOD_RES (5)..(5): phosphoserine
RHLPSPPTLFFRKNLLRLTG

SEQ ID NO: 1997 - protein, 20 aa, Artificial Sequence
  Description of Artificial Sequence: Synthetic peptide
  MOD_RES (4)..(4): phosphoserine
RIGSDPLAYFFRKNLLRLTG

SEQ ID NO: 1998 - protein, 21 aa, Artificial Sequence
  Description of Artificial Sequence: Synthetic peptide
  MOD_RES (5)..(5): phosphothreonine
RIIETPPHRYFFRKNLLRLTG

SEQ ID NO: 1999 - protein, 21 aa, Artificial Sequence
  Description of Artificial Sequence: Synthetic peptide
  MOD_RES (7)..(7): phosphotyrosine
RIKLGDYHFYFFRKNLLRLTG

SEQ ID NO: 2000 - protein, 20 aa, Artificial Sequence
  Description of Artificial Sequence: Synthetic peptide
  MOD_RES (5)..(5): phosphoserine
RILFSPFFHFFRKNLLRLTG

SEQ ID NO: 2001 - protein, 23 aa, Artificial Sequence
  Description of Artificial Sequence: Synthetic peptide
  MOD_RES (4)..(4): phosphoserine
RILSATTSGIFLFFRKNLLRLTG

SEQ ID NO: 2002 - protein, 22 aa, Artificial Sequence
  Description of Artificial Sequence: Synthetic peptide
  MOD_RES (4)..(4): phosphoserine
RILSDVTHSAVFFRKNLLRLTG

SEQ ID NO: 2003 - protein, 21 aa, Artificial Sequence
  Description of Artificial Sequence: Synthetic peptide
  MOD_RES (4)..(4): phosphoserine
  MOD_RES (10)..(10): oxidized methionine
RILSGVVTKMFFRKNLLRLTG

SEQ ID NO: 2004 - protein, 21 aa, Artificial Sequence
  Description of Artificial Sequence: Synthetic peptide
  MOD_RES (4)..(4): phosphoserine
RILSGVVTKMFFRKNLLRLTG

SEQ ID NO: 2005 - protein, 23 aa, Artificial Sequence
  Description of Artificial Sequence: Synthetic peptide
  MOD_RES (4)..(4): phosphoserine
RILSGVVTKMKMFFRKNLLRLTG

SEQ ID NO: 2006 - protein, 23 aa, Artificial Sequence
  Description of Artificial Sequence: Synthetic peptide
  MOD_RES (4)..(4): phosphoserine
RIMSPMRTGNTYFFRKNLLRLTG

SEQ ID NO: 2007 - protein, 21 aa, Artificial Sequence
  Description of Artificial Sequence: Synthetic peptide
  MOD_RES (4)..(4): phosphoserine
RIQSPLNNKLFFRKNLLRLTG

SEQ ID NO: 2008 - protein, 20 aa, Artificial Sequence
  Description of Artificial Sequence: Synthetic peptide
  MOD_RES (4)..(4): phosphoserine
RIRSIEALLFFRKNLLRLTG

SEQ ID NO: 2009 - protein, 20 aa, Artificial Sequence
  Description of Artificial Sequence: Synthetic peptide
  MOD_RES (3)..(3): phosphothreonine
RITSLIVHVFFRKNLLRLTG

SEQ ID NO: 2010 - protein, 21 aa, Artificial Sequence
  Description of Artificial Sequence: Synthetic peptide
  MOD_RES (4)..(4): phosphoserine
RITSPVHVSFFFRKNLLRLTG

SEQ ID NO: 2011 - protein, 22 aa, Artificial Sequence
  Description of Artificial Sequence: Synthetic peptide
  MOD_RES (4)..(4): phosphoserine
RIVSPKNSDLKFFRKNLLRLTG

SEQ ID NO: 2012 - protein, 20 aa, Artificial Sequence
  Description of Artificial Sequence: Synthetic peptide
  MOD_RES (4)..(4): phosphoserine
RIWSPTIGRFFRKNLLRLTG

SEQ ID NO: 2013 - protein, 20 aa, Artificial Sequence
  Description of Artificial Sequence: Synthetic peptide
  MOD_RES (6)..(6): phosphothreonine
RIWSPTIGRFFRKNLLRLTG

SEQ ID NO: 2014 - protein, 22 aa, Artificial Sequence
  Description of Artificial Sequence: Synthetic peptide
  MOD_RES (4)..(4): phosphoserine
RIYSRIDRLEAFFRKNLLRLTG

SEQ ID NO: 2015 - protein, 20 aa, Artificial Sequence
  Description of Artificial Sequence: Synthetic peptide
  MOD_RES (4)..(4): phosphoserine
RKFSAPGQLFFRKNLLRLTG

SEQ ID NO: 2016 - protein, 20 aa, Artificial Sequence
  Description of Artificial Sequence: Synthetic peptide
  MOD_RES (4)..(4): phosphoserine
RKLSFTESLFFRKNLLRLTG

SEQ ID NO: 2017 - protein, 20 aa, Artificial Sequence
  Description of Artificial Sequence: Synthetic peptide
  MOD_RES (6)..(6): phosphothreonine
RKLSFTESLFFRKNLLRLTG

SEQ ID NO: 2018 - protein, 21 aa, Artificial Sequence
  Description of Artificial Sequence: Synthetic peptide
  MOD_RES (4)..(4): phosphoserine
RKLSGDQITLFFRKNLLRLTG

SEQ ID NO: 2019 - protein, 20 aa, Artificial Sequence
  Description of Artificial Sequence: Synthetic peptide
  MOD_RES (4)..(4): phosphoserine
RKLSVALAFFFRKNLLRLTG

SEQ ID NO: 2020 - protein, 20 aa, Artificial Sequence
  Description of Artificial Sequence: Synthetic peptide
  MOD_RES (4)..(4): phosphoserine
RKLSVLLLLFFRKNLLRLTG

SEQ ID NO: 2021 - protein, 20 aa, Artificial Sequence
  Description of Artificial Sequence: Synthetic peptide
  MOD_RES (4)..(4): phosphoserine
  MOD_RES (7)..(7): oxidized methionine
RKNSFVMEYFFRKNLLRLTG

SEQ ID NO: 2022 - protein, 20 aa, Artificial Sequence
  Description of Artificial Sequence: Synthetic peptide
  MOD_RES (4)..(4): phosphoserine
RKNSFVMEYFFRKNLLRLTG

SEQ ID NO: 2023 - protein, 20 aa, Artificial Sequence
  Description of Artificial Sequence: Synthetic peptide
  MOD_RES (4)..(4): phosphoserine
RKNSLISSLFFRKNLLRLTG

SEQ ID NO: 2024 - protein, 20 aa, Artificial Sequence
  Description of Artificial Sequence: Synthetic peptide
  MOD_RES (4)..(4): phosphoserine
  MOD_RES (9)..(9): oxidized methionine
RKSSIIIRMFFRKNLLRLTG

SEQ ID NO: 2025 - protein, 20 aa, Artificial Sequence
  Description of Artificial Sequence: Synthetic peptide
  MOD_RES (4)..(4): phosphoserine
RLASLFSSLFFRKNLLRLTG

SEQ ID NO: 2026 - protein, 21 aa, Artificial Sequence
  Description of Artificial Sequence: Synthetic peptide
  MOD_RES (4)..(4): phosphoserine
RLASLMNLGMFFRKNLLRLTG

SEQ ID NO: 2027 - protein, 20 aa, Artificial Sequence
  Description of Artificial Sequence: Synthetic peptide
  MOD_RES (4)..(4): phosphoserine
RLASYLEKVFFRKNLLRLTG

SEQ ID NO: 2028 - protein, 20 aa, Artificial Sequence
  Description of Artificial Sequence: Synthetic peptide
  MOD_RES (4)..(4): phosphoserine
RLDSELKELFFRKNLLRLTG

SEQ ID NO: 2029 - protein, 21 aa, Artificial Sequence
  Description of Artificial Sequence: Synthetic peptide
  MOD_RES (4)..(4): phosphoserine
RLDSGHVWKLFFRKNLLRLTG

SEQ ID NO: 2030 - protein, 20 aa, Artificial Sequence
  Description of Artificial Sequence: Synthetic peptide
  MOD_RES (4)..(4): phosphoserine
  MOD_RES (9)..(9): cysteinylated cysteine
RLFSKELRCFFRKNLLRLTG

SEQ ID NO: 2031 - protein, 21 aa, Artificial Sequence
  Description of Artificial Sequence: Synthetic peptide
  MOD_RES (4)..(4): phosphoserine
RLFSKSIETLFFRKNLLRLTG

SEQ ID NO: 2032 - protein, 20 aa, Artificial Sequence
  Description of Artificial Sequence: Synthetic peptide
  MOD_RES (4)..(4): phosphoserine
RLFSSFLKRFFRKNLLRLTG

SEQ ID NO: 2033 - protein, 21 aa, Artificial Sequence
  Description of Artificial Sequence: Synthetic peptide
  MOD_RES (4)..(4): phosphoserine
RLISLSEQNLFFRKNLLRLTG

SEQ ID NO: 2034 - protein, 21 aa, Artificial Sequence
  Description of Artificial Sequence: Synthetic peptide
  MOD_RES (6)..(6): phosphoserine
RLISLSEQNLFFRKNLLRLTG

SEQ ID NO: 2035 - protein, 20 aa, Artificial Sequence
  Description of Artificial Sequence: Synthetic peptide
  MOD_RES (4)..(4): phosphoserine
RLISQIVSSFFRKNLLRLTG

SEQ ID NO: 2036 - protein, 23 aa, Artificial Sequence
  Description of Artificial Sequence: Synthetic peptide
  MOD_RES (4)..(4): phosphoserine
RLISQIVSSITAFFRKNLLRLTG

SEQ ID NO: 2037 - protein, 20 aa, Artificial Sequence
  Description of Artificial Sequence: Synthetic peptide
  MOD_RES (4)..(4): phosphoserine
RLISVVSHLFFRKNLLRLTG

SEQ ID NO: 2038 - protein, 23 aa, Artificial Sequence
  Description of Artificial Sequence: Synthetic peptide
  MOD_RES (4)..(4): phosphoserine
RLKSIEERQLLKFFRKNLLRLTG

SEQ ID NO: 2039 - protein, 22 aa, Artificial Sequence
  Description of Artificial Sequence: Synthetic peptide
  MOD_RES (6)..(6): phosphoserine
RLLQDSVDFSLFFRKNLLRLTG

SEQ ID NO: 2040 - protein, 21 aa, Artificial Sequence
  Description of Artificial Sequence: Synthetic peptide
  MOD_RES (6)..(6): phosphoserine
RLLQDSVDSLFFRKNLLRLTG

SEQ ID NO: 2041 - protein, 20 aa, Artificial Sequence
  Description of Artificial Sequence: Synthetic peptide
  MOD_RES (4)..(4): phosphoserine
RLLSAAENFFFRKNLLRLTG

SEQ ID NO: 2042 - protein, 21 aa, Artificial Sequence
  Description of Artificial Sequence: Synthetic peptide
  MOD_RES (4)..(4): phosphoserine
RLLSEKILGLFFRKNLLRLTG

SEQ ID NO: 2043 - protein, 22 aa, Artificial Sequence
  Description of Artificial Sequence: Synthetic peptide
  MOD_RES (4)..(4): phosphoserine
RLLSIKEAFRLFFRKNLLRLTG

SEQ ID NO: 2044 - protein, 20 aa, Artificial Sequence
  Description of Artificial Sequence: Synthetic peptide
  MOD_RES (4)..(4): phosphoserine
RLLSVNIRVFFRKNLLRLTG

SEQ ID NO: 2045 - protein, 22 aa, Artificial Sequence
  Description of Artificial Sequence: Synthetic peptide
  MOD_RES (4)..(4): phosphoserine
RLNSPPSSIYKFFRKNLLRLTG

SEQ ID NO: 2046 - protein, 20 aa, Artificial Sequence
  Description of Artificial Sequence: Synthetic peptide
  MOD_RES (6)..(6): phosphoserine
RLPLPSPALFFRKNLLRLTG

SEQ ID NO: 2047 - protein, 21 aa, Artificial Sequence
  Description of Artificial Sequence: Synthetic peptide
  MOD_RES (4)..(4): phosphoserine
RLPSDPFTHLFFRKNLLRLTG

SEQ ID NO: 2048 - protein, 23 aa, Artificial Sequence
  Description of Artificial Sequence: Synthetic peptide
  MOD_RES (4)..(4): phosphoserine
RLPSPTSPFSSLFFRKNLLRLTG

SEQ ID NO: 2049 - protein, 20 aa, Artificial Sequence
  Description of Artificial Sequence: Synthetic peptide
  MOD_RES (5)..(5): phosphoserine
RLPSSTLKRFFRKNLLRLTG

SEQ ID NO: 2050 - protein, 20 aa, Artificial Sequence
  Description of Artificial Sequence: Synthetic peptide
  MOD_RES (4)..(4): phosphothreonine
RLPTVLLKLFFRKNLLRLTG

SEQ ID NO: 2051 - protein, 19 aa, Artificial Sequence
  Description of Artificial Sequence: Synthetic peptide
  MOD_RES (7)..(7): phosphoserine
RLQHSFSFFFRKNLLRLTG

SEQ ID NO: 2052 - protein, 20 aa, Artificial Sequence
  Description of Artificial Sequence: Synthetic peptide
  MOD_RES (4)..(4): phosphoserine
RLRSSVPGVFFRKNLLRLTG

SEQ ID NO: 2053 - protein, 20 aa, Artificial Sequence
  Description of Artificial Sequence: Synthetic peptide
  MOD_RES (5)..(5): phosphoserine
RLRSSVPGVFFRKNLLRLTG

SEQ ID NO: 2054 - protein, 20 aa, Artificial Sequence
  Description of Artificial Sequence: Synthetic peptide
  MOD_RES (4)..(4): phosphoserine
  MOD_RES (8)..(8): oxidized methionine
RLRSYEDMIFFRKNLLRLTG

SEQ ID NO: 2055 - protein, 20 aa, Artificial Sequence
  Description of Artificial Sequence: Synthetic peptide
  MOD_RES (3)..(3): phosphoserine
RLSPVPVPRFFRKNLLRLTG

SEQ ID NO: 2056 - protein, 20 aa, Artificial Sequence
  Description of Artificial Sequence: Synthetic peptide
  MOD_RES (3)..(3): phosphoserine
RLSSVSVTYFFRKNLLRLTG

SEQ ID NO: 2057 - protein, 20 aa, Artificial Sequence
  Description of Artificial Sequence: Synthetic peptide
  MOD_RES (4)..(4): phosphoserine
RLSSVSVTYFFRKNLLRLTG

SEQ ID NO: 2058 - protein, 22 aa, Artificial Sequence
  Description of Artificial Sequence: Synthetic peptide
  MOD_RES (4)..(4): phosphothreonine
RLWTPPEDYRLFFRKNLLRLTG

SEQ ID NO: 2059 - protein, 20 aa, Artificial Sequence
  Description of Artificial Sequence: Synthetic peptide
  MOD_RES (5)..(5): phosphoserine
RLYKSEPELFFRKNLLRLTG

SEQ ID NO: 2060 - protein, 20 aa, Artificial Sequence
  Description of Artificial Sequence: Synthetic peptide
  MOD_RES (4)..(4): phosphoserine
RLYSVSYLLFFRKNLLRLTG

SEQ ID NO: 2061 - protein, 22 aa, Artificial Sequence
  Description of Artificial Sequence: Synthetic peptide
  MOD_RES (2)..(2): oxidized methionine
  MOD_RES (4)..(4): phosphoserine
RMISHSELRKLFFRKNLLRLTG

SEQ ID NO: 2062 - protein, 22 aa, Artificial Sequence
  Description of Artificial Sequence: Synthetic peptide
  MOD_RES (4)..(4): phosphoserine
RMISHSELRKLFFRKNLLRLTG

SEQ ID NO: 2063 - protein, 21 aa, Artificial Sequence
  Description of Artificial Sequence: Synthetic peptide
  MOD_RES (4)..(4): phosphoserine
RMISKLEAQVFFRKNLLRLTG

SEQ ID NO: 2064 - protein, 21 aa, Artificial Sequence
  Description of Artificial Sequence: Synthetic peptide
  MOD_RES (2)..(2): oxidized methionine
  MOD_RES (4)..(4): phosphoserine
RMKSPFGSSFFFRKNLLRLTG

SEQ ID NO: 2065 - protein, 21 aa, Artificial Sequence
  Description of Artificial Sequence: Synthetic peptide
  MOD_RES (4)..(4): phosphoserine
RMKSPFGSSFFFRKNLLRLTG

SEQ ID NO: 2066 - protein, 21 aa, Artificial Sequence
  Description of Artificial Sequence: Synthetic peptide
  MOD_RES (2)..(2): oxidized methionine
  MOD_RES (4)..(4): phosphoserine
RMLSLRDQRLFFRKNLLRLTG

SEQ ID NO: 2067 - protein, 20 aa, Artificial Sequence
  Description of Artificial Sequence: Synthetic peptide
  MOD_RES (2)..(2): oxidized methionine
  MOD_RES (4)..(4): phosphoserine
RMYSFDDVLFFRKNLLRLTG

SEQ ID NO: 2068 - protein, 20 aa, Artificial Sequence
  Description of Artificial Sequence: Synthetic peptide
  MOD_RES (4)..(4): phosphoserine
RNASLERVLFFRKNLLRLTG

SEQ ID NO: 2069 - protein, 22 aa, Artificial Sequence
  Description of Artificial Sequence: Synthetic peptide
  MOD_RES (10)..(10): phosphoserine
RPADSAQLLSLFFRKNLLRLTG

SEQ ID NO: 2070 - protein, 22 aa, Artificial Sequence
  Description of Artificial Sequence: Synthetic peptide
  MOD_RES (5)..(5): phosphoserine
RPARSVPSIAAFFRKNLLRLTG

SEQ ID NO: 2071 - protein, 20 aa, Artificial Sequence
  Description of Artificial Sequence: Synthetic peptide
  MOD_RES (4)..(4): phosphoserine
RPASPALLLFFRKNLLRLTG

SEQ ID NO: 2072 - protein, 20 aa, Artificial Sequence
  Description of Artificial Sequence: Synthetic peptide
  MOD_RES (4)..(4): phosphoserine
RPASPLMHIFFRKNLLRLTG

SEQ ID NO: 2073 - protein, 20 aa, Artificial Sequence
  Description of Artificial Sequence: Synthetic peptide
  MOD_RES (6)..(6): phosphoserine
RPASPSLQLFFRKNLLRLTG

SEQ ID NO: 2074 - protein, 26 aa, Artificial Sequence
  Description of Artificial Sequence: Synthetic peptide
  MOD_RES (10)..(10): phosphoserine
RPFHGISTVSLPNSLFFRKNLLRLTG

SEQ ID NO: 2075 - protein, 21 aa, Artificial Sequence
  Description of Artificial Sequence: Synthetic peptide
  MOD_RES (4)..(4): phosphoserine
RPFSKPEIALFFRKNLLRLTG

SEQ ID NO: 2076 - protein, 20 aa, Artificial Sequence
  Description of Artificial Sequence: Synthetic peptide
  MOD_RES (4)..(4): phosphoserine
RPFSREMDLFFRKNLLRLTG

SEQ ID NO: 2077 - protein, 22 aa, Artificial Sequence
  Description of Artificial Sequence: Synthetic peptide
  MOD_RES (10)..(10): phosphoserine
RPHLSGRKLSLFFRKNLLRLTG

SEQ ID NO: 2078 - protein, 20 aa, Artificial Sequence
  Description of Artificial Sequence: Synthetic peptide
  MOD_RES (4)..(4): phosphothreonine
RPHTPTPGIFFRKNLLRLTG

SEQ ID NO: 2079 - protein, 22 aa, Artificial Sequence
  Description of Artificial Sequence: Synthetic peptide
  MOD_RES (4)..(4): phosphothreonine
  MOD_RES (11)..(11): oxidized methionine
RPHTPTPGIYMFFRKNLLRLTG

SEQ ID NO: 2080 - protein, 22 aa, Artificial Sequence
  Description of Artificial Sequence: Synthetic peptide
  MOD_RES (6)..(6): phosphothreonine
RPHTPTPGIYMFFRKNLLRLTG

SEQ ID NO: 2081 - protein, 20 aa, Artificial Sequence
  Description of Artificial Sequence: Synthetic peptide
  MOD_RES (4)..(4): phosphoserine
RPISPRIGAFFRKNLLRLTG

SEQ ID NO: 2082 - protein, 21 aa, Artificial Sequence
  Description of Artificial Sequence: Synthetic peptide
  MOD_RES (4)..(4): phosphoserine
RPISVIGGVSFFRKNLLRLTG

SEQ ID NO: 2083 - protein, 20 aa, Artificial Sequence
  Description of Artificial Sequence: Synthetic peptide
  MOD_RES (4)..(4): phosphothreonine
RPITPVYTVFFRKNLLRLTG

SEQ ID NO: 2084 - protein, 21 aa, Artificial Sequence
  Description of Artificial Sequence: Synthetic peptide
  MOD_RES (4)..(4): phosphothreonine
RPITPVYTVAFFRKNLLRLTG

SEQ ID NO: 2085 - protein, 21 aa, Artificial Sequence
  Description of Artificial Sequence: Synthetic peptide
  MOD_RES (9)..(9): phosphoserine
RPKLHHSLSFFFRKNLLRLTG

SEQ ID NO: 2086 - protein, 21 aa, Artificial Sequence
  Description of Artificial Sequence: Synthetic peptide
  MOD_RES (7)..(7): phosphoserine
RPKPSSSPVIFFRKNLLRLTG

SEQ ID NO: 2087 - protein, 22 aa, Artificial Sequence
  Description of Artificial Sequence: Synthetic peptide
  MOD_RES (6)..(6): phosphoserine
RPKPSSSPVIFFFRKNLLRLTG

SEQ ID NO: 2088 - protein, 22 aa, Artificial Sequence
  Description of Artificial Sequence: Synthetic peptide
  MOD_RES (7)..(7): phosphoserine
RPKPSSSPVIFFFRKNLLRLTG

SEQ ID NO: 2089 - protein, 23 aa, Artificial Sequence
  Description of Artificial Sequence: Synthetic peptide
  MOD_RES (5)..(5): phosphoserine
RPKPSSSPVIFAFFRKNLLRLTG

SEQ ID NO: 2090 - protein, 23 aa, Artificial Sequence
  Description of Artificial Sequence: Synthetic peptide
  MOD_RES (6)..(6): phosphoserine
RPKPSSSPVIFAFFRKNLLRLTG

SEQ ID NO: 2091 - protein, 23 aa, Artificial Sequence
  Description of Artificial Sequence: Synthetic peptide
  MOD_RES (7)..(7): phosphoserine
RPKPSSSPVIFAFFRKNLLRLTG

SEQ ID NO: 2092 - protein, 21 aa, Artificial Sequence
  Description of Artificial Sequence: Synthetic peptide
  MOD_RES (4)..(4): phosphoserine
RPKSTPELAFFFRKNLLRLTG

SEQ ID NO: 2093 - protein, 20 aa, Artificial Sequence
  Description of Artificial Sequence: Synthetic peptide
  MOD_RES (4)..(4): phosphothreonine
RPKTPPPAPFFRKNLLRLTG

SEQ ID NO: 2094 - protein, 20 aa, Artificial Sequence
  Description of Artificial Sequence: Synthetic peptide
  MOD_RES (4)..(4): phosphoserine
RPLSKQLSAFFRKNLLRLTG

SEQ ID NO: 2095 - protein, 21 aa, Artificial Sequence
  Description of Artificial Sequence: Synthetic peptide
  MOD_RES (4)..(4): phosphoserine
RPLSLIQGPPFFRKNLLRLTG

SEQ ID NO: 2096 - protein, 19 aa, Artificial Sequence
  Description of Artificial Sequence: Synthetic peptide
  MOD_RES (4)..(4): phosphoserine
RPLSPFYLFFRKNLLRLTG

SEQ ID NO: 2097 - protein, 21 aa, Artificial Sequence
  Description of Artificial Sequence: Synthetic peptide
  MOD_RES (4)..(4): phosphoserine
RPLSPFYLSAFFRKNLLRLTG

SEQ ID NO: 2098 - protein, 21 aa, Artificial Sequence
  Description of Artificial Sequence: Synthetic peptide
  MOD_RES (4)..(4): phosphoserine
RPLSPGALQLFFRKNLLRLTG

SEQ ID NO: 2099 - protein, 21 aa, Artificial Sequence
  Description of Artificial Sequence: Synthetic peptide
  MOD_RES (4)..(4): phosphoserine
RPLSPILHIVFFRKNLLRLTG

SEQ ID NO: 2100 - protein, 22 aa, Artificial Sequence
  Description of Artificial Sequence: Synthetic peptide
  MOD_RES (4)..(4): phosphoserine
RPLSPKPSSPGFFRKNLLRLTG

SEQ ID NO: 2101 - protein, 25 aa, Artificial Sequence
  Description of Artificial Sequence: Synthetic peptide
  MOD_RES (4)..(4): phosphoserine
RPLSPKPSSPGSVLFFRKNLLRLTG

SEQ ID NO: 2102 - protein, 25 aa, Artificial Sequence
  Description of Artificial Sequence: Synthetic peptide
  MOD_RES (8)..(8): phosphoserine
RPLSPKPSSPGSVLFFRKNLLRLTG

SEQ ID NO: 2103 - protein, 23 aa, Artificial Sequence
  Description of Artificial Sequence: Synthetic peptide
  MOD_RES (4)..(4): phosphoserine
RPLSPTRLQPALFFRKNLLRLTG

SEQ ID NO: 2104 - protein, 20 aa, Artificial Sequence
  Description of Artificial Sequence: Synthetic peptide
  MOD_RES (4)..(4): phosphothreonine
RPLTPRTPAFFRKNLLRLTG

SEQ ID NO: 2105 - protein, 22 aa, Artificial Sequence
  Description of Artificial Sequence: Synthetic peptide
  MOD_RES (4)..(4): phosphoserine
RPNSLVGITSAFFRKNLLRLTG

SEQ ID NO: 2106 - protein, 21 aa, Artificial Sequence
  Description of Artificial Sequence: Synthetic peptide
  MOD_RES (6)..(6): phosphoserine
RPNSPSPTALFFRKNLLRLTG

SEQ ID NO: 2107 - protein, 21 aa, Artificial Sequence
  Description of Artificial Sequence: Synthetic peptide
  MOD_RES (4)..(4): phosphoserine
RPNSSALETLFFRKNLLRLTG

SEQ ID NO: 2108 - protein, 21 aa, Artificial Sequence
  Description of Artificial Sequence: Synthetic peptide
  MOD_RES (5)..(5): phosphoserine
RPNSSALETLFFRKNLLRLTG

SEQ ID NO: 2109 - protein, 22 aa, Artificial Sequence
  Description of Artificial Sequence: Synthetic peptide
  MOD_RES (4)..(4): phosphoserine
RPPSPGLRGLLFFRKNLLRLTG

SEQ ID NO: 2110 - protein, 24 aa, Artificial Sequence
  Description of Artificial Sequence: Synthetic peptide
  MOD_RES (7)..(7): phosphoserine
RPQESRSLSPSHLFFRKNLLRLTG

SEQ ID NO: 2111 - protein, 24 aa, Artificial Sequence
  Description of Artificial Sequence: Synthetic peptide
  MOD_RES (9)..(9): phosphoserine
RPQESRSLSPSHLFFRKNLLRLTG

SEQ ID NO: 2112 - protein, 22 aa, Artificial Sequence
  Description of Artificial Sequence: Synthetic peptide
  MOD_RES (4)..(4): phosphoserine
RPQSPPAEAVIFFRKNLLRLTG

SEQ ID NO: 2113 - protein, 23 aa, Artificial Sequence
  Description of Artificial Sequence: Synthetic peptide
  MOD_RES (4)..(4): phosphothreonine
RPQTPKEEAQALFFRKNLLRLTG

SEQ ID NO: 2114 - protein, 24 aa, Artificial Sequence
  Description of Artificial Sequence: Synthetic peptide
  MOD_RES (6)..(6): phosphoserine
RPRAFSHSGVHSLFFRKNLLRLTG

SEQ ID NO: 2115 - protein, 22 aa, Artificial Sequence
  Description of Artificial Sequence: Synthetic peptide
  MOD_RES (6)..(6): phosphoserine
RPRAFSIASSLFFRKNLLRLTG

SEQ ID NO: 2116 - protein, 20 aa, Artificial Sequence
  Description of Artificial Sequence: Synthetic peptide
  MOD_RES (6)..(6): phosphothreonine
RPREVTVSLFFRKNLLRLTG

SEQ ID NO: 2117 - protein, 21 aa, Artificial Sequence
  Description of Artificial Sequence: Synthetic peptide
  MOD_RES (6)..(6): phosphoserine
RPRFMSSPVLFFRKNLLRLTG

SEQ ID NO: 2118 - protein, 21 aa, Artificial Sequence
  Description of Artificial Sequence: Synthetic peptide
  MOD_RES (7)..(7): phosphoserine
RPRFMSSPVLFFRKNLLRLTG

SEQ ID NO: 2119 - protein, 22 aa, Artificial Sequence
  Description of Artificial Sequence: Synthetic peptide
  MOD_RES (6)..(6): phosphoserine
  MOD_RES (11)..(11): oxidized methionine
RPRGPSPLVTMFFRKNLLRLTG

SEQ ID NO: 2120 - protein, 22 aa, Artificial Sequence
  Description of Artificial Sequence: Synthetic peptide
  MOD_RES (6)..(6): phosphoserine
RPRGPSPLVTMFFRKNLLRLTG

SEQ ID NO: 2121 - protein, 21 aa, Artificial Sequence
  Description of Artificial Sequence: Synthetic peptide
  MOD_RES (7)..(7): phosphoserine
RPRLQHSFSFFFRKNLLRLTG

SEQ ID NO: 2122 - protein, 21 aa, Artificial Sequence
  Description of Artificial Sequence: Synthetic peptide
  MOD_RES (9)..(9): phosphoserine
RPRLQHSFSFFFRKNLLRLTG

SEQ ID NO: 2123 - protein, 22 aa, Artificial Sequence
  Description of Artificial Sequence: Synthetic peptide
  MOD_RES (6)..(6): phosphoserine
RPRPSSVLRTLFFRKNLLRLTG

SEQ ID NO: 2124 - protein, 26 aa, Artificial Sequence
  Description of Artificial Sequence: Synthetic peptide
  MOD_RES (6)..(6): phosphoserine
RPRPVSPSSLLDTAIFFRKNLLRLTG

SEQ ID NO: 2125 - protein, 21 aa, Artificial Sequence
  Description of Artificial Sequence: Synthetic peptide
  MOD_RES (6)..(6): phosphoserine
RPRSISVEEFFFRKNLLRLTG

SEQ ID NO: 2126 - protein, 23 aa, Artificial Sequence
  Description of Artificial Sequence: Synthetic peptide
  MOD_RES (7)..(7): phosphoserine
RPRSLSSPTVTLFFRKNLLRLTG

SEQ ID NO: 2127 - protein, 21 aa, Artificial Sequence
  Description of Artificial Sequence: Synthetic peptide
  MOD_RES (4)..(4): phosphoserine
  MOD_RES (7)..(7): oxidized methionine
RPRSPNMQDLFFRKNLLRLTG

SEQ ID NO: 2128 - protein, 22 aa, Artificial Sequence
  Description of Artificial Sequence: Synthetic peptide
  MOD_RES (4)..(4): phosphoserine
RPRSPPEPLRVFFRKNLLRLTG

SEQ ID NO: 2129 - protein, 23 aa, Artificial Sequence
  Description of Artificial Sequence: Synthetic peptide
  MOD_RES (6)..(6): phosphothreonine
RPRSPTGPSNSFFFRKNLLRLTG

SEQ ID NO: 2130 - protein, 20 aa, Artificial Sequence
  Description of Artificial Sequence: Synthetic peptide
  MOD_RES (4)..(4): phosphothreonine
RPRTLRTRLFFRKNLLRLTG

SEQ ID NO: 2131 - protein, 20 aa, Artificial Sequence
  Description of Artificial Sequence: Synthetic peptide
  MOD_RES (3)..(3): phosphoserine
  MOD_RES (9)..(9): oxidized methionine
RPSSAPDLMFFRKNLLRLTG

SEQ ID NO: 2132 - protein, 20 aa, Artificial Sequence
  Description of Artificial Sequence: Synthetic peptide
  MOD_RES (3)..(3): phosphoserine
RPSSAPDLMFFRKNLLRLTG

SEQ ID NO: 2133 - protein, 20 aa, Artificial Sequence
  Description of Artificial Sequence: Synthetic peptide
  MOD_RES (4)..(4): phosphoserine
  MOD_RES (9)..(9): oxidized methionine
RPSSAPDLMFFRKNLLRLTG

SEQ ID NO: 2134 - protein, 20 aa, Artificial Sequence
  Description of Artificial Sequence: Synthetic peptide
  MOD_RES (4)..(4): phosphoserine
RPSSAPDLMFFRKNLLRLTG

SEQ ID NO: 2135 - protein, 20 aa, Artificial Sequence
  Description of Artificial Sequence: Synthetic peptide
  MOD_RES (3)..(3): phosphoserine
RPSSGFYELFFRKNLLRLTG

SEQ ID NO: 2136 - protein, 20 aa, Artificial Sequence
  Description of Artificial Sequence: Synthetic peptide
  MOD_RES (3)..(3): phosphoserine
RPSSGQDLFFFRKNLLRLTG

SEQ ID NO: 2137 - protein, 20 aa, Artificial Sequence
  Description of Artificial Sequence: Synthetic peptide
  MOD_RES (4)..(4): phosphoserine
RPSSGQDLFFFRKNLLRLTG

SEQ ID NO: 2138 - protein, 20 aa, Artificial Sequence
  Description of Artificial Sequence: Synthetic peptide
  MOD_RES (4)..(4): phosphoserine
RPSSLRQYLFFRKNLLRLTG

SEQ ID NO: 2139 - protein, 22 aa, Artificial Sequence
  Description of Artificial Sequence: Synthetic peptide
  MOD_RES (4)..(4): phosphoserine
RPSSPLIDIKPFFRKNLLRLTG

SEQ ID NO: 2140 - protein, 21 aa, Artificial Sequence
  Description of Artificial Sequence: Synthetic peptide
  MOD_RES (3)..(3): phosphoserine
RPSSPVHVAFFFRKNLLRLTG

SEQ ID NO: 2141 - protein, 21 aa, Artificial Sequence
  Description of Artificial Sequence: Synthetic peptide
  MOD_RES (4)..(4): phosphoserine
RPSSPVHVAFFFRKNLLRLTG

SEQ ID NO: 2142 - protein, 22 aa, Artificial Sequence
  Description of Artificial Sequence: Synthetic peptide
  MOD_RES (4)..(4): phosphoserine
RPSSPVTVTALFFRKNLLRLTG

SEQ ID NO: 2143 - protein, 22 aa, Artificial Sequence
  Description of Artificial Sequence: Synthetic peptide
  MOD_RES (4)..(4): phosphoserine
  MOD_RES (9)..(9): oxidized methionine
RPSSRVALMVLFFRKNLLRLTG

SEQ ID NO: 2144 - protein, 22 aa, Artificial Sequence
  Description of Artificial Sequence: Synthetic peptide
  MOD_RES (4)..(4): phosphoserine
RPSSRVALMVLFFRKNLLRLTG

SEQ ID NO: 2145 - protein, 21 aa, Artificial Sequence
  Description of Artificial Sequence: Synthetic peptide
  MOD_RES (4)..(4): phosphothreonine
RPSTPHTITLFFRKNLLRLTG

SEQ ID NO: 2146 - protein, 21 aa, Artificial Sequence
  Description of Artificial Sequence: Synthetic peptide
  MOD_RES (3)..(3): phosphoserine
RPSTPTINVLFFRKNLLRLTG

SEQ ID NO: 2147 - protein, 21 aa, Artificial Sequence
  Description of Artificial Sequence: Synthetic peptide
  MOD_RES (4)..(4): phosphothreonine
RPSTPTINVLFFRKNLLRLTG

SEQ ID NO: 2148 - protein, 21 aa, Artificial Sequence
  Description of Artificial Sequence: Synthetic peptide
  MOD_RES (6)..(6): phosphothreonine
RPSTPTINVLFFRKNLLRLTG

SEQ ID NO: 2149 - protein, 20 aa, Artificial Sequence
  Description of Artificial Sequence: Synthetic peptide
  MOD_RES (3)..(3): phosphothreonine
RPTSFADELFFRKNLLRLTG

SEQ ID NO: 2150 - protein, 21 aa, Artificial Sequence
  Description of Artificial Sequence: Synthetic peptide
  MOD_RES (4)..(4): phosphoserine
RPTSISWDGLFFRKNLLRLTG

SEQ ID NO: 2151 - protein, 21 aa, Artificial Sequence
  Description of Artificial Sequence: Synthetic peptide
  MOD_RES (6)..(6): phosphoserine
RPTSISWDGLFFRKNLLRLTG

SEQ ID NO: 2152 - protein, 21 aa, Artificial Sequence
  Description of Artificial Sequence: Synthetic peptide
  MOD_RES (4)..(4): phosphoserine
RPTSPRLLTLFFRKNLLRLTG

SEQ ID NO: 2153 - protein, 21 aa, Artificial Sequence
  Description of Artificial Sequence: Synthetic peptide
  MOD_RES (9)..(9): phosphoserine
RPVDPRRRSLFFRKNLLRLTG

SEQ ID NO: 2154 - protein, 20 aa, Artificial Sequence
  Description of Artificial Sequence: Synthetic peptide
  MOD_RES (4)..(4): phosphoserine
RPVSEMFSLFFRKNLLRLTG

SEQ ID NO: 2155 - protein, 22 aa, Artificial Sequence
  Description of Artificial Sequence: Synthetic peptide
  MOD_RES (4)..(4): phosphoserine
RPVSMDARIQVFFRKNLLRLTG

SEQ ID NO: 2156 - protein, 22 aa, Artificial Sequence
  Description of Artificial Sequence: Synthetic peptide
  MOD_RES (4)..(4): phosphoserine
RPVSPGKDITAFFRKNLLRLTG

SEQ ID NO: 2157 - protein, 21 aa, Artificial Sequence
  Description of Artificial Sequence: Synthetic peptide
  MOD_RES (5)..(5): phosphothreonine
RPVSTDFAQYFFRKNLLRLTG

SEQ ID NO: 2158 - protein, 20 aa, Artificial Sequence
  Description of Artificial Sequence: Synthetic peptide
  MOD_RES (4)..(4): phosphothreonine
RPVTPITNFFFRKNLLRLTG

SEQ ID NO: 2159 - protein, 20 aa, Artificial Sequence
  Description of Artificial Sequence: Synthetic peptide
  MOD_RES (4)..(4): phosphothreonine
RPVTPPRTAFFRKNLLRLTG

SEQ ID NO: 2160 - protein, 20 aa, Artificial Sequence
  Description of Artificial Sequence: Synthetic peptide
  MOD_RES (3)..(3): oxidized tryptophan
  MOD_RES (4)..(4): phosphoserine
RPWSNSRGLFFRKNLLRLTG

SEQ ID NO: 2161 - protein, 20 aa, Artificial Sequence
  Description of Artificial Sequence: Synthetic peptide
  MOD_RES (3)..(3): oxidized tryptophan
  MOD_RES (4)..(4): phosphoserine
RPWSPAVSAFFRKNLLRLTG

SEQ ID NO: 2162 - protein, 21 aa, Artificial Sequence
  Description of Artificial Sequence: Synthetic peptide
  MOD_RES (5)..(5): phosphoserine
RPYPSPGAVLFFRKNLLRLTG

SEQ ID NO: 2163 - protein, 22 aa, Artificial Sequence
  Description of Artificial Sequence: Synthetic peptide
  MOD_RES (4)..(4): phosphoserine
RQASIELPSMAFFRKNLLRLTG

SEQ ID NO: 2164 - protein, 23 aa, Artificial Sequence
  Description of Artificial Sequence: Synthetic peptide
  MOD_RES (4)..(4): phosphoserine
  MOD_RES (10)..(10): oxidized methionine
RQASIELPSMAVFFRKNLLRLTG

SEQ ID NO: 2165 - protein, 24 aa, Artificial Sequence
  Description of Artificial Sequence: Synthetic peptide
  MOD_RES (4)..(4): phosphoserine
  MOD_RES (10)..(10): oxidized methionine
RQASIELPSMAVAFFRKNLLRLTG

SEQ ID NO: 2166 - protein, 26 aa, Artificial Sequence
  Description of Artificial Sequence: Synthetic peptide
  MOD_RES (4)..(4): phosphoserine
  MOD_RES (10)..(10): oxidized methionine
RQASIELPSMAVASTFFRKNLLRLTG

SEQ ID NO: 2167 - protein, 26 aa, Artificial Sequence
  Description of Artificial Sequence: Synthetic peptide
  MOD_RES (4)..(4): phosphoserine
RQASIELPSMAVASTFFRKNLLRLTG

SEQ ID NO: 2168 - protein, 20 aa, Artificial Sequence
  Description of Artificial Sequence: Synthetic peptide
  MOD_RES (6)..(6): phosphoserine
RQASLSISVFFRKNLLRLTG

SEQ ID NO: 2169 - protein, 22 aa, Artificial Sequence
  Description of Artificial Sequence: Synthetic peptide
  MOD_RES (10)..(10): phosphoserine
RQFDEESLESFFFRKNLLRLTG

SEQ ID NO: 2170 - protein, 20 aa, Artificial Sequence
  Description of Artificial Sequence: Synthetic peptide
  MOD_RES (8)..(8): phosphoserine
RQFTSSSSIFFRKNLLRLTG

SEQ ID NO: 2171 - protein, 20 aa, Artificial Sequence
  Description of Artificial Sequence: Synthetic peptide
  MOD_RES (5)..(5): phosphoserine
RQHFSPLSLFFRKNLLRLTG

SEQ ID NO: 2172 - protein, 22 aa, Artificial Sequence
  Description of Artificial Sequence: Synthetic peptide
  MOD_RES (6)..(6): phosphoserine
  MOD_RES (9)..(9): oxidized tryptophan
RQIQPSPPWSYFFRKNLLRLTG

SEQ ID NO: 2173 - protein, 22 aa, Artificial Sequence
  Description of Artificial Sequence: Synthetic peptide
  MOD_RES (6)..(6): phosphoserine
RQIQPSPPWSYFFRKNLLRLTG

SEQ ID NO: 2174 - protein, 22 aa, Artificial Sequence
  Description of Artificial Sequence: Synthetic peptide
  MOD_RES (4)..(4): phosphoserine
RQISIRGIVGVFFRKNLLRLTG

SEQ ID NO: 2175 - protein, 21 aa, Artificial Sequence
  Description of Artificial Sequence: Synthetic peptide
  MOD_RES (4)..(4): phosphoserine
RQISISEPQAFFRKNLLRLTG

SEQ ID NO: 2176 - protein, 22 aa, Artificial Sequence
  Description of Artificial Sequence: Synthetic peptide
  MOD_RES (4)..(4): phosphoserine
RQISISEPQAFFFRKNLLRLTG

SEQ ID NO: 2177 - protein, 23 aa, Artificial Sequence
  Description of Artificial Sequence: Synthetic peptide
  MOD_RES (4)..(4): phosphoserine
RQISISEPQAFLFFRKNLLRLTG

SEQ ID NO: 2178 - protein, 24 aa, Artificial Sequence
  Description of Artificial Sequence: Synthetic peptide
  MOD_RES (4)..(4): phosphoserine
RQISISEPQAFLFFFRKNLLRLTG

SEQ ID NO: 2179 - protein, 21 aa, Artificial Sequence
  Description of Artificial Sequence: Synthetic peptide
  MOD_RES (4)..(4): phosphoserine
RQISPEEFEYFFRKNLLRLTG

SEQ ID NO: 2180 - protein, 21 aa, Artificial Sequence
  Description of Artificial Sequence: Synthetic peptide
  MOD_RES (4)..(4): phosphoserine
RQKSPLFQFAFFRKNLLRLTG

SEQ ID NO: 2181 - protein, 20 aa, Artificial Sequence
  Description of Artificial Sequence: Synthetic peptide
  MOD_RES (4)..(4): phosphoserine
RQPSEEEIIFFRKNLLRLTG

SEQ ID NO: 2182 - protein, 22 aa, Artificial Sequence
  Description of Artificial Sequence: Synthetic peptide
  MOD_RES (4)..(4): phosphoserine
RQPSEEEIIKLFFRKNLLRLTG

SEQ ID NO: 2183 - protein, 21 aa, Artificial Sequence
  Description of Artificial Sequence: Synthetic peptide
  MOD_RES (4)..(4): phosphoserine
RQPSWDPSPVFFRKNLLRLTG

SEQ ID NO: 2184 - protein, 24 aa, Artificial Sequence
  Description of Artificial Sequence: Synthetic peptide
  MOD_RES (6)..(6): phosphoserine
RQRSLSTSGESLYFFRKNLLRLTG

SEQ ID NO: 2185 - protein, 23 aa, Artificial Sequence
  Description of Artificial Sequence: Synthetic peptide
  MOD_RES (4)..(4): phosphoserine
RQVSEDPDIDSLFFRKNLLRLTG

SEQ ID NO: 2186 - protein, 21 aa, Artificial Sequence
  Description of Artificial Sequence: Synthetic peptide
  MOD_RES (4)..(4): phosphoserine
RRASLSDIGFFFRKNLLRLTG

SEQ ID NO: 2187 - protein, 22 aa, Artificial Sequence
  Description of Artificial Sequence: Synthetic peptide
  MOD_RES (7)..(7): phosphoserine
RRFRFPSGAELFFRKNLLRLTG

SEQ ID NO: 2188 - protein, 20 aa, Artificial Sequence
  Description of Artificial Sequence: Synthetic peptide
  MOD_RES (4)..(4): phosphoserine
RRFSDFLGLFFRKNLLRLTG

SEQ ID NO: 2189 - protein, 21 aa, Artificial Sequence
  Description of Artificial Sequence: Synthetic peptide
  MOD_RES (6)..(6): phosphoserine
RRFSFSGNTLFFRKNLLRLTG

SEQ ID NO: 2190 - protein, 19 aa, Artificial Sequence
  Description of Artificial Sequence: Synthetic peptide
  MOD_RES (4)..(4): phosphoserine
RRFSGLLNFFRKNLLRLTG

SEQ ID NO: 2191 - protein, 20 aa, Artificial Sequence
  Description of Artificial Sequence: Synthetic peptide
  MOD_RES (4)..(4): phosphoserine
  MOD_RES (9)..(9): cysteinylated cysteine
RRFSGLLNCFFRKNLLRLTG

SEQ ID NO: 2192 - protein, 20 aa, Artificial Sequence
  Description of Artificial Sequence: Synthetic peptide
  MOD_RES (4)..(4): phosphoserine
RRFSGLLNCFFRKNLLRLTG

SEQ ID NO: 2193 - protein, 21 aa, Artificial Sequence
  Description of Artificial Sequence: Synthetic peptide
  MOD_RES (4)..(4): phosphoserine
RRFSGLSAELFFRKNLLRLTG

SEQ ID NO: 2194 - protein, 20 aa, Artificial Sequence
  Description of Artificial Sequence: Synthetic peptide
  MOD_RES (4)..(4): phosphoserine
RRFSLDTDYFFRKNLLRLTG

SEQ ID NO: 2195 - protein, 21 aa, Artificial Sequence
  Description of Artificial Sequence: Synthetic peptide
  MOD_RES (4)..(4): phosphoserine
RRFSPPRRMLFFRKNLLRLTG

SEQ ID NO: 2196 - protein, 20 aa, Artificial Sequence
  Description of Artificial Sequence: Synthetic peptide
  MOD_RES (4)..(4): phosphoserine
RRFSVTLRLFFRKNLLRLTG

SEQ ID NO: 2197 - protein, 20 aa, Artificial Sequence
  Description of Artificial Sequence: Synthetic peptide
  MOD_RES (4)..(4): phosphothreonine
RRFTEIYEFFFRKNLLRLTG

SEQ ID NO: 2198 - protein, 21 aa, Artificial Sequence
  Description of Artificial Sequence: Synthetic peptide
  MOD_RES (4)..(4): phosphothreonine
RRFTPPSTALFFRKNLLRLTG

SEQ ID NO: 2199 - protein, 18 aa, Artificial Sequence
  Description of Artificial Sequence: Synthetic peptide
  MOD_RES (4)..(4): phosphoserine
RRGSFDAFFRKNLLRLTG

SEQ ID NO: 2200 - protein, 19 aa, Artificial Sequence
  Description of Artificial Sequence: Synthetic peptide
  MOD_RES (4)..(4): phosphoserine
RRGSFDATFFRKNLLRLTG

SEQ ID NO: 2201 - protein, 20 aa, Artificial Sequence
  Description of Artificial Sequence: Synthetic peptide
  MOD_RES (4)..(4): phosphoserine
RRGSFDATGFFRKNLLRLTG

SEQ ID NO: 2202 - protein, 22 aa, Artificial Sequence
  Description of Artificial Sequence: Synthetic peptide
  MOD_RES (4)..(4): phosphoserine
RRGSFDATGSGFFRKNLLRLTG

SEQ ID NO: 2203 - protein, 23 aa, Artificial Sequence
  Description of Artificial Sequence: Synthetic peptide
  MOD_RES (4)..(4): phosphoserine
RRGSFDATGSGFFFRKNLLRLTG

SEQ ID NO: 2204 - protein, 25 aa, Artificial Sequence
  Description of Artificial Sequence: Synthetic peptide
  MOD_RES (4)..(4): phosphoserine
RRGSFDATGSGFSMFFRKNLLRLTG

SEQ ID NO: 2205 - protein, 27 aa, Artificial Sequence
  Description of Artificial Sequence: Synthetic peptide
  MOD_RES (4)..(4): phosphoserine
  MOD_RES (14)..(14): oxidized methionine
RRGSFDATGSGFSMTFFFRKNLLRLTG

SEQ ID NO: 2206 - protein, 27 aa, Artificial Sequence
  Description of Artificial Sequence: Synthetic peptide
  MOD_RES (4)..(4): phosphoserine
RRGSFDATGSGFSMTFFFRKNLLRLTG

SEQ ID NO: 2207 - protein, 21 aa, Artificial Sequence
  Description of Artificial Sequence: Synthetic peptide
  MOD_RES (4)..(4): phosphoserine
RRGSFEVTLLFFRKNLLRLTG

SEQ ID NO: 2208 - protein, 22 aa, Artificial Sequence
  Description of Artificial Sequence: Synthetic peptide
  MOD_RES (4)..(4): phosphoserine
RRGSGPEIFTFFFRKNLLRLTG

SEQ ID NO: 2209 - protein, 21 aa, Artificial Sequence
  Description of Artificial Sequence: Synthetic peptide
  MOD_RES (4)..(4): phosphoserine
RRGSPEMPFYFFRKNLLRLTG

SEQ ID NO: 2210 - protein, 23 aa, Artificial Sequence
  Description of Artificial Sequence: Synthetic peptide
  MOD_RES (6)..(6): phosphoserine
RRIDISPSTFRKFFRKNLLRLTG

SEQ ID NO: 2211 - protein, 23 aa, Artificial Sequence
  Description of Artificial Sequence: Synthetic peptide
  MOD_RES (8)..(8): phosphoserine
RRIDISPSTLRKFFRKNLLRLTG

SEQ ID NO: 2212 - protein, 20 aa, Artificial Sequence
  Description of Artificial Sequence: Synthetic peptide
  MOD_RES (6)..(6): phosphothreonine
RRISLTKRLFFRKNLLRLTG

SEQ ID NO: 2213 - protein, 20 aa, Artificial Sequence
  Description of Artificial Sequence: Synthetic peptide
  MOD_RES (7)..(7): oxidized tryptophan
  MOD_RES (8)..(8): phosphothreonine
RRLDRRWTLFFRKNLLRLTG

SEQ ID NO: 2214 - protein, 20 aa, Artificial Sequence
  Description of Artificial Sequence: Synthetic peptide
  MOD_RES (8)..(8): phosphothreonine
RRLDRRWTLFFRKNLLRLTG

SEQ ID NO: 2215 - protein, 21 aa, Artificial Sequence
  Description of Artificial Sequence: Synthetic peptide
  MOD_RES (4)..(4): phosphoserine
RRLSFQAEYWFFRKNLLRLTG

SEQ ID NO: 2216 - protein, 20 aa, Artificial Sequence
  Description of Artificial Sequence: Synthetic peptide
  MOD_RES (4)..(4): phosphoserine
RRLSLFLVLFFRKNLLRLTG

SEQ ID NO: 2217 - protein, 21 aa, Artificial Sequence
  Description of Artificial Sequence: Synthetic peptide
  MOD_RES (4)..(4): phosphoserine
RRLSVLVDDYFFRKNLLRLTG

SEQ ID NO: 2218 - protein, 21 aa, Artificial Sequence
  Description of Artificial Sequence: Synthetic peptide
  MOD_RES (4)..(4): phosphoserine
RRMSVGDRAGFFRKNLLRLTG

SEQ ID NO: 2219 - protein, 26 aa, Artificial Sequence
  Description of Artificial Sequence: Synthetic peptide
  MOD_RES (4)..(4): phosphoserine
RRMSVGDRAGSLPNYFFRKNLLRLTG

SEQ ID NO: 2220 - protein, 20 aa, Artificial Sequence
  Description of Artificial Sequence: Synthetic peptide
  MOD_RES (4)..(4): phosphoserine
RRNSLRIIFFFRKNLLRLTG

SEQ ID NO: 2221 - protein, 22 aa, Artificial Sequence
  Description of Artificial Sequence: Synthetic peptide
  MOD_RES (4)..(4): phosphoserine
RRPSQNAISFFFFRKNLLRLTG

SEQ ID NO: 2222 - protein, 20 aa, Artificial Sequence
  Description of Artificial Sequence: Synthetic peptide
  MOD_RES (4)..(4): phosphothreonine
RRPTLTTFFFFRKNLLRLTG

SEQ ID NO: 2223 - protein, 20 aa, Artificial Sequence
  Description of Artificial Sequence: Synthetic peptide
  MOD_RES (3)..(3): phosphoserine
RRSDSLLSFFFRKNLLRLTG

SEQ ID NO: 2224 - protein, 20 aa, Artificial Sequence
  Description of Artificial Sequence: Synthetic peptide
  MOD_RES (5)..(5): phosphoserine
RRSDSLLSFFFRKNLLRLTG

SEQ ID NO: 2225 - protein, 20 aa, Artificial Sequence
  Description of Artificial Sequence: Synthetic peptide
  MOD_RES (6)..(6): phosphoserine
RRSIISPNFFFRKNLLRLTG

SEQ ID NO: 2226 - protein, 24 aa, Artificial Sequence
  Description of Artificial Sequence: Synthetic peptide
  MOD_RES (3)..(3): phosphoserine
RRSSFSMEEGDVLFFRKNLLRLTG

SEQ ID NO: 2227 - protein, 24 aa, Artificial Sequence
  Description of Artificial Sequence: Synthetic peptide
  MOD_RES (4)..(4): phosphoserine
RRSSFSMEEGDVLFFRKNLLRLTG

SEQ ID NO: 2228 - protein, 20 aa, Artificial Sequence
  Description of Artificial Sequence: Synthetic peptide
  MOD_RES (3)..(3): phosphoserine
RRSSIPITVFFRKNLLRLTG

SEQ ID NO: 2229 - protein, 20 aa, Artificial Sequence
  Description of Artificial Sequence: Synthetic peptide
  MOD_RES (4)..(4): phosphoserine
RRSSISSWLFFRKNLLRLTG

SEQ ID NO: 2230 - protein, 20 aa, Artificial Sequence
  Description of Artificial Sequence: Synthetic peptide
  MOD_RES (3)..(3): phosphoserine
  MOD_RES (9)..(9): oxidized methionine
RRSSLLSLMFFRKNLLRLTG

SEQ ID NO: 2231 - protein, 20 aa, Artificial Sequence
  Description of Artificial Sequence: Synthetic peptide
  MOD_RES (3)..(3): phosphoserine
RRSSLLSLMFFRKNLLRLTG

SEQ ID NO: 2232 - protein, 20 aa, Artificial Sequence
  Description of Artificial Sequence: Synthetic peptide
  MOD_RES (4)..(4): phosphoserine
  MOD_RES (9)..(9): oxidized methionine
RRSSLLSLMFFRKNLLRLTG

SEQ ID NO: 2233 - protein, 20 aa, Artificial Sequence
  Description of Artificial Sequence: Synthetic peptide
  MOD_RES (3)..(3): phosphoserine
RRSSYLLAIFFRKNLLRLTG

SEQ ID NO: 2234 - protein, 20 aa, Artificial Sequence
  Description of Artificial Sequence: Synthetic peptide
  MOD_RES (4)..(4): phosphoserine
RRSSYLLAIFFRKNLLRLTG

SEQ ID NO: 2235 - protein, 20 aa, Artificial Sequence
  Description of Artificial Sequence: Synthetic peptide
  MOD_RES (3)..(3): phosphoserine
RRSTGVSFWFFRKNLLRLTG

SEQ ID NO: 2236 - protein, 20 aa, Artificial Sequence
  Description of Artificial Sequence: Synthetic peptide
  MOD_RES (4)..(4): phosphothreonine
RRSTGVSFWFFRKNLLRLTG

SEQ ID NO: 2237 - protein, 20 aa, Artificial Sequence
  Description of Artificial Sequence: Synthetic peptide
  MOD_RES (4)..(4): phosphoserine
RRTSIHDFLFFRKNLLRLTG

SEQ ID NO: 2238 - protein, 21 aa, Artificial Sequence
  Description of Artificial Sequence: Synthetic peptide
  MOD_RES (4)..(4): phosphoserine
RRVSLSEIGFFFRKNLLRLTG

SEQ ID NO: 2239 - protein, 22 aa, Artificial Sequence
  Description of Artificial Sequence: Synthetic peptide
  MOD_RES (4)..(4): phosphoserine
RRVSSNGIFDLFFRKNLLRLTG

SEQ ID NO: 2240 - protein, 22 aa, Artificial Sequence
  Description of Artificial Sequence: Synthetic peptide
  MOD_RES (5)..(5): phosphoserine
RRVSSNGIFDLFFRKNLLRLTG

SEQ ID NO: 2241 - protein, 20 aa, Artificial Sequence
  Description of Artificial Sequence: Synthetic peptide
  MOD_RES (4)..(4): phosphoserine
RRYSDFAKLFFRKNLLRLTG

SEQ ID NO: 2242 - protein, 20 aa, Artificial Sequence
  Description of Artificial Sequence: Synthetic peptide
  MOD_RES (6)..(6): phosphoserine
RSELLSFIKFFRKNLLRLTG

SEQ ID NO: 2243 - protein, 24 aa, Artificial Sequence
  Description of Artificial Sequence: Synthetic peptide
  MOD_RES (4)..(4): phosphoserine
RSFSADNFIGIQRFFRKNLLRLTG

SEQ ID NO: 2244 - protein, 20 aa, Artificial Sequence
  Description of Artificial Sequence: Synthetic peptide
  MOD_RES (4)..(4): phosphoserine
RSFSGLIKRFFRKNLLRLTG

SEQ ID NO: 2245 - protein, 22 aa, Artificial Sequence
  Description of Artificial Sequence: Synthetic peptide
  MOD_RES (4)..(4): phosphoserine
RSFSMHDLTTIFFRKNLLRLTG

SEQ ID NO: 2246 - protein, 22 aa, Artificial Sequence
  Description of Artificial Sequence: Synthetic peptide
  MOD_RES (4)..(4): phosphoserine
RSFSPKSPLELFFRKNLLRLTG

SEQ ID NO: 2247 - protein, 20 aa, Artificial Sequence
  Description of Artificial Sequence: Synthetic peptide
  MOD_RES (4)..(4): phosphoserine
  MOD_RES (7)..(7): oxidized methionine
RSFSPTMKVFFRKNLLRLTG

SEQ ID NO: 2248 - protein, 20 aa, Artificial Sequence
  Description of Artificial Sequence: Synthetic peptide
  MOD_RES (6)..(6): phosphothreonine
RSFSPTMKVFFRKNLLRLTG

SEQ ID NO: 2249 - protein, 19 aa, Artificial Sequence
  Description of Artificial Sequence: Synthetic peptide
  MOD_RES (4)..(4): phosphothreonine
RSFTPLSIFFRKNLLRLTG

SEQ ID NO: 2250 - protein, 21 aa, Artificial Sequence
  Description of Artificial Sequence: Synthetic peptide
  MOD_RES (4)..(4): phosphothreonine
RSFTPLSILKFFRKNLLRLTG

SEQ ID NO: 2251 - protein, 20 aa, Artificial Sequence
  Description of Artificial Sequence: Synthetic peptide
  MOD_RES (4)..(4): phosphoserine
RSHSPPLKLFFRKNLLRLTG

SEQ ID NO: 2252 - protein, 21 aa, Artificial Sequence
  Description of Artificial Sequence: Synthetic peptide
  MOD_RES (6)..(6): phosphoserine
RSIRDSGYIDFFRKNLLRLTG

SEQ ID NO: 2253 - protein, 23 aa, Artificial Sequence
  Description of Artificial Sequence: Synthetic peptide
  MOD_RES (6)..(6): phosphoserine
  MOD_RES (11)..(11): cysteinylated cysteine
  MOD_RES (12)..(12): oxidized tryptophan
RSIRDSGYIDCWFFRKNLLRLTG

SEQ ID NO: 2254 - protein, 23 aa, Artificial Sequence
  Description of Artificial Sequence: Synthetic peptide
  MOD_RES (6)..(6): phosphoserine
  MOD_RES (11)..(11): cysteinylated cysteine
RSIRDSGYIDCWFFRKNLLRLTG

SEQ ID NO: 2255 - protein, 21 aa, Artificial Sequence
  Description of Artificial Sequence: Synthetic peptide
  MOD_RES (6)..(6): phosphoserine
RSISASDLTFFFRKNLLRLTG

SEQ ID NO: 2256 - protein, 21 aa, Artificial Sequence
  Description of Artificial Sequence: Synthetic peptide
  MOD_RES (4)..(4): phosphoserine
RSISNEGLTLFFRKNLLRLTG

SEQ ID NO: 2257 - protein, 19 aa, Artificial Sequence
  Description of Artificial Sequence: Synthetic peptide
  MOD_RES (4)..(4): phosphoserine
RSISPLLFFFRKNLLRLTG

SEQ ID NO: 2258 - protein, 20 aa, Artificial Sequence
  Description of Artificial Sequence: Synthetic peptide
  MOD_RES (4)..(4): phosphoserine
RSISPWLARFFRKNLLRLTG

SEQ ID NO: 2259 - protein, 22 aa, Artificial Sequence
  Description of Artificial Sequence: Synthetic peptide
  MOD_RES (4)..(4): phosphoserine
RSISQSSTDSYFFRKNLLRLTG

SEQ ID NO: 2260 - protein, 20 aa, Artificial Sequence
  Description of Artificial Sequence: Synthetic peptide
  MOD_RES (4)..(4): phosphoserine
RSISSLLRFFFRKNLLRLTG

SEQ ID NO: 2261 - protein, 20 aa, Artificial Sequence
  Description of Artificial Sequence: Synthetic peptide
  MOD_RES (4)..(4): phosphoserine
  MOD_RES (8)..(8): cysteinylated cysteine
RSISTPTCLFFRKNLLRLTG

SEQ ID NO: 2262 - protein, 20 aa, Artificial Sequence
  Description of Artificial Sequence: Synthetic peptide
  MOD_RES (4)..(4): phosphoserine
RSKSVIEQVFFRKNLLRLTG

SEQ ID NO: 2263 - protein, 22 aa, Artificial Sequence
  Description of Artificial Sequence: Synthetic peptide
  MOD_RES (4)..(4): phosphoserine
RSKSVIEQVSWFFRKNLLRLTG

SEQ ID NO: 2264 - protein, 20 aa, Artificial Sequence
  Description of Artificial Sequence: Synthetic peptide
  MOD_RES (4)..(4): phosphoserine
RSLSFSDEMFFRKNLLRLTG

SEQ ID NO: 2265 - protein, 20 aa, Artificial Sequence
  Description of Artificial Sequence: Synthetic peptide
  MOD_RES (4)..(4): phosphoserine
RSLSPFRRHFFRKNLLRLTG

SEQ ID NO: 2266 - protein, 23 aa, Artificial Sequence
  Description of Artificial Sequence: Synthetic peptide
  MOD_RES (4)..(4): phosphoserine
RSLSPIIGKDVLFFRKNLLRLTG

SEQ ID NO: 2267 - protein, 21 aa, Artificial Sequence
  Description of Artificial Sequence: Synthetic peptide
  MOD_RES (4)..(4): phosphoserine
RSLSPILPGRFFRKNLLRLTG

SEQ ID NO: 2268 - protein, 20 aa, Artificial Sequence
  Description of Artificial Sequence: Synthetic peptide
  MOD_RES (4)..(4): phosphoserine
  MOD_RES (6)..(6): oxidized methionine
RSLSPMSGLFFRKNLLRLTG

SEQ ID NO: 2269 - protein, 20 aa, Artificial Sequence
  Description of Artificial Sequence: Synthetic peptide
  MOD_RES (4)..(4): phosphoserine
RSLSPMSGLFFRKNLLRLTG

SEQ ID NO: 2270 - protein, 22 aa, Artificial Sequence
  Description of Artificial Sequence: Synthetic peptide
  MOD_RES (4)..(4): phosphoserine
RSLSPSSNSAFFFRKNLLRLTG

SEQ ID NO: 2271 - protein, 21 aa, Artificial Sequence
  Description of Artificial Sequence: Synthetic peptide
  MOD_RES (2)..(2): phosphoserine
RSLSQELVGVFFRKNLLRLTG

SEQ ID NO: 2272 - protein, 20 aa, Artificial Sequence
  Description of Artificial Sequence: Synthetic peptide
  MOD_RES (2)..(2): phosphoserine
RSLSVEIVYFFRKNLLRLTG

SEQ ID NO: 2273 - protein, 20 aa, Artificial Sequence
  Description of Artificial Sequence: Synthetic peptide
  MOD_RES (4)..(4): phosphoserine
RSLSVGSEFFFRKNLLRLTG

SEQ ID NO: 2274 - protein, 20 aa, Artificial Sequence
  Description of Artificial Sequence: Synthetic peptide
  MOD_RES (4)..(4): phosphoserine
RSLSVPVDLFFRKNLLRLTG

SEQ ID NO: 2275 - protein, 23 aa, Artificial Sequence
  Description of Artificial Sequence: Synthetic peptide
  MOD_RES (4)..(4): phosphoserine
RSLSVPVDLSRWFFRKNLLRLTG

SEQ ID NO: 2276 - protein, 20 aa, Artificial Sequence
  Description of Artificial Sequence: Synthetic peptide
  MOD_RES (4)..(4): phosphothreonine
RSLTHPPTIFFRKNLLRLTG

SEQ ID NO: 2277 - protein, 20 aa, Artificial Sequence
  Description of Artificial Sequence: Synthetic peptide
  MOD_RES (3)..(3): oxidized methionine
  MOD_RES (8)..(8): phosphothreonine
RSMDSVLTLFFRKNLLRLTG

SEQ ID NO: 2278 - protein, 20 aa, Artificial Sequence
  Description of Artificial Sequence: Synthetic peptide
  MOD_RES (8)..(8): phosphothreonine
RSMDSVLTLFFRKNLLRLTG

SEQ ID NO: 2279 - protein, 20 aa, Artificial Sequence
  Description of Artificial Sequence: Synthetic peptide
  MOD_RES (4)..(4): phosphoserine
RSNSPLPSIFFRKNLLRLTG

SEQ ID NO: 2280 - protein, 21 aa, Artificial Sequence
  Description of Artificial Sequence: Synthetic peptide
  MOD_RES (4)..(4): phosphoserine
RSPSFGEDYYFFRKNLLRLTG

SEQ ID NO: 2281 - protein, 20 aa, Artificial Sequence
  Description of Artificial Sequence: Synthetic peptide
  MOD_RES (4)..(4): phosphoserine
RSPSQDFSFFFRKNLLRLTG

SEQ ID NO: 2282 - protein, 20 aa, Artificial Sequence
  Description of Artificial Sequence: Synthetic peptide
  MOD_RES (4)..(4): phosphoserine
RSQSLPNSLFFRKNLLRLTG

SEQ ID NO: 2283 - protein, 21 aa, Artificial Sequence
  Description of Artificial Sequence: Synthetic peptide
  MOD_RES (4)..(4): phosphoserine
RSRSAPPNLWFFRKNLLRLTG

SEQ ID NO: 2284 - protein, 20 aa, Artificial Sequence
  Description of Artificial Sequence: Synthetic peptide
  MOD_RES (4)..(4): phosphoserine
RSRSFDYNYFFRKNLLRLTG

SEQ ID NO: 2285 - protein, 21 aa, Artificial Sequence
  Description of Artificial Sequence: Synthetic peptide
  MOD_RES (4)..(4): phosphoserine
RSRSFDYNYRFFRKNLLRLTG

SEQ ID NO: 2286 - protein, 22 aa, Artificial Sequence
  Description of Artificial Sequence: Synthetic peptide
  MOD_RES (4)..(4): phosphoserine
RSRSFSGLIKRFFRKNLLRLTG

SEQ ID NO: 2287 - protein, 22 aa, Artificial Sequence
  Description of Artificial Sequence: Synthetic peptide
  MOD_RES (6)..(6): phosphoserine
RSRSFSGLIKRFFRKNLLRLTG

SEQ ID NO: 2288 - protein, 21 aa, Artificial Sequence
  Description of Artificial Sequence: Synthetic peptide
  MOD_RES (4)..(4): phosphoserine
RSRSPFSTTRFFRKNLLRLTG

SEQ ID NO: 2289 - protein, 24 aa, Artificial Sequence
  Description of Artificial Sequence: Synthetic peptide
  MOD_RES (4)..(4): phosphoserine
RSRSPLELEPEAKFFRKNLLRLTG

SEQ ID NO: 2290 - protein, 21 aa, Artificial Sequence
  Description of Artificial Sequence: Synthetic peptide
  MOD_RES (4)..(4): phosphoserine
RSRSPLGFYVFFRKNLLRLTG

SEQ ID NO: 2291 - protein, 20 aa, Artificial Sequence
  Description of Artificial Sequence: Synthetic peptide
  MOD_RES (4)..(4): phosphoserine
RSRSPLLKFFFRKNLLRLTG

SEQ ID NO: 2292 - protein, 23 aa, Artificial Sequence
  Description of Artificial Sequence: Synthetic peptide
  MOD_RES (4)..(4): phosphoserine
RSRSPSDSAAYFFFRKNLLRLTG

SEQ ID NO: 2293 - protein, 20 aa, Artificial Sequence
  Description of Artificial Sequence: Synthetic peptide
  MOD_RES (4)..(4): phosphoserine
RSRSVPVSFFFRKNLLRLTG

SEQ ID NO: 2294 - protein, 21 aa, Artificial Sequence
  Description of Artificial Sequence: Synthetic peptide
  MOD_RES (4)..(4): phosphoserine
RSSSFKDFAKFFRKNLLRLTG

SEQ ID NO: 2295 - protein, 20 aa, Artificial Sequence
  Description of Artificial Sequence: Synthetic peptide
  MOD_RES (4)..(4): phosphoserine
RSSSFSDTLFFRKNLLRLTG

SEQ ID NO: 2296 - protein, 20 aa, Artificial Sequence
  Description of Artificial Sequence: Synthetic peptide
  MOD_RES (3)..(3): phosphoserine
RSSSFVLPKFFRKNLLRLTG

SEQ ID NO: 2297 - protein, 20 aa, Artificial Sequence
  Description of Artificial Sequence: Synthetic peptide
  MOD_RES (4)..(4): phosphoserine
RSSSFVLPKFFRKNLLRLTG

SEQ ID NO: 2298 - protein, 21 aa, Artificial Sequence
  Description of Artificial Sequence: Synthetic peptide
  MOD_RES (2)..(2): phosphoserine
RSSSFVLPKLFFRKNLLRLTG

SEQ ID NO: 2299 - protein, 21 aa, Artificial Sequence
  Description of Artificial Sequence: Synthetic peptide
  MOD_RES (3)..(3): phosphoserine
RSSSFVLPKLFFRKNLLRLTG

SEQ ID NO: 2300 - protein, 21 aa, Artificial Sequence
  Description of Artificial Sequence: Synthetic peptide
  MOD_RES (4)..(4): phosphoserine
RSSSFVLPKLFFRKNLLRLTG

SEQ ID NO: 2301 - protein, 21 aa, Artificial Sequence
  Description of Artificial Sequence: Synthetic peptide
  MOD_RES (2)..(2): phosphoserine
  MOD_RES (10)..(10): oxidized tryptophan
RSSSLSDFSWFFRKNLLRLTG

SEQ ID NO: 2302 - protein, 21 aa, Artificial Sequence
  Description of Artificial Sequence: Synthetic peptide
  MOD_RES (2)..(2): phosphoserine
RSSSLSDFSWFFRKNLLRLTG

SEQ ID NO: 2303 - protein, 21 aa, Artificial Sequence
  Description of Artificial Sequence: Synthetic peptide
  MOD_RES (3)..(3): phosphoserine
  MOD_RES (10)..(10): oxidized tryptophan
RSSSLSDFSWFFRKNLLRLTG

SEQ ID NO: 2304 - protein, 21 aa, Artificial Sequence
  Description of Artificial Sequence: Synthetic peptide
  MOD_RES (3)..(3): phosphoserine
RSSSLSDFSWFFRKNLLRLTG

SEQ ID NO: 2305 - protein, 21 aa, Artificial Sequence
  Description of Artificial Sequence: Synthetic peptide
  MOD_RES (4)..(4): phosphoserine
  MOD_RES (10)..(10): oxidized tryptophan
RSSSLSDFSWFFRKNLLRLTG

SEQ ID NO: 2306 - protein, 21 aa, Artificial Sequence
  Description of Artificial Sequence: Synthetic peptide
  MOD_RES (4)..(4): phosphoserine
RSSSLSDFSWFFRKNLLRLTG

SEQ ID NO: 2307 - protein, 20 aa, Artificial Sequence
  Description of Artificial Sequence: Synthetic peptide
  MOD_RES (2)..(2): phosphoserine
RSSSPFLSKFFRKNLLRLTG

SEQ ID NO: 2308 - protein, 20 aa, Artificial Sequence
  Description of Artificial Sequence: Synthetic peptide
  MOD_RES (3)..(3): phosphoserine
RSSSPFLSKFFRKNLLRLTG

SEQ ID NO: 2309 - protein, 21 aa, Artificial Sequence
  Description of Artificial Sequence: Synthetic peptide
  MOD_RES (4)..(4): phosphoserine
RSSSPPILTKFFRKNLLRLTG

SEQ ID NO: 2310 - protein, 22 aa, Artificial Sequence
  Description of Artificial Sequence: Synthetic peptide
  MOD_RES (3)..(3): phosphoserine
RSSSTELLSHYFFRKNLLRLTG

SEQ ID NO: 2311 - protein, 22 aa, Artificial Sequence
  Description of Artificial Sequence: Synthetic peptide
  MOD_RES (4)..(4): phosphoserine
RSSSTELLSHYFFRKNLLRLTG

SEQ ID NO: 2312 - protein, 20 aa, Artificial Sequence
  Description of Artificial Sequence: Synthetic peptide
  MOD_RES (4)..(4): phosphoserine
RSSSWGRTYFFRKNLLRLTG

SEQ ID NO: 2313 - protein, 20 aa, Artificial Sequence
  Description of Artificial Sequence: Synthetic peptide
  MOD_RES (4)..(4): phosphothreonine
RSSTPLPTIFFRKNLLRLTG

SEQ ID NO: 2314 - protein, 20 aa, Artificial Sequence
  Description of Artificial Sequence: Synthetic peptide
  MOD_RES (2)..(2): phosphoserine
RSTSLSLKYFFRKNLLRLTG

SEQ ID NO: 2315 - protein, 20 aa, Artificial Sequence
  Description of Artificial Sequence: Synthetic peptide
  MOD_RES (3)..(3): phosphothreonine
RSTSLSLKYFFRKNLLRLTG

SEQ ID NO: 2316 - protein, 20 aa, Artificial Sequence
  Description of Artificial Sequence: Synthetic peptide
  MOD_RES (4)..(4): phosphoserine
RSTSLSLKYFFRKNLLRLTG

SEQ ID NO: 2317 - protein, 22 aa, Artificial Sequence
  Description of Artificial Sequence: Synthetic peptide
  MOD_RES (4)..(4): phosphoserine
RSVSFKLLERWFFRKNLLRLTG

SEQ ID NO: 2318 - protein, 20 aa, Artificial Sequence
  Description of Artificial Sequence: Synthetic peptide
  MOD_RES (4)..(4): phosphoserine
RSVSPVQDLFFRKNLLRLTG

SEQ ID NO: 2319 - protein, 20 aa, Artificial Sequence
  Description of Artificial Sequence: Synthetic peptide
  MOD_RES (4)..(4): phosphoserine
RSVSVATGLFFRKNLLRLTG

SEQ ID NO: 2320 - protein, 22 aa, Artificial Sequence
  Description of Artificial Sequence: Synthetic peptide
  MOD_RES (4)..(4): phosphoserine
RSWSPPPEVSRFFRKNLLRLTG

SEQ ID NO: 2321 - protein, 20 aa, Artificial Sequence
  Description of Artificial Sequence: Synthetic peptide
  MOD_RES (8)..(8): phosphoserine
RSYRTDISMFFRKNLLRLTG

SEQ ID NO: 2322 - protein, 21 aa, Artificial Sequence
  Description of Artificial Sequence: Synthetic peptide
  MOD_RES (4)..(4): phosphoserine
RTASPPALPKFFRKNLLRLTG

SEQ ID NO: 2323 - protein, 21 aa, Artificial Sequence
  Description of Artificial Sequence: Synthetic peptide
  MOD_RES (4)..(4): phosphoserine
RTFSDESNVLFFRKNLLRLTG

SEQ ID NO: 2324 - protein, 20 aa, Artificial Sequence
  Description of Artificial Sequence: Synthetic peptide
  MOD_RES (2)..(2): phosphothreonine
RTFSLDTILFFRKNLLRLTG

SEQ ID NO: 2325 - protein, 23 aa, Artificial Sequence
  Description of Artificial Sequence: Synthetic peptide
  MOD_RES (4)..(4): phosphoserine
RTFSLDTILSSYFFRKNLLRLTG

SEQ ID NO: 2326 - protein, 20 aa, Artificial Sequence
  Description of Artificial Sequence: Synthetic peptide
  MOD_RES (6)..(6): phosphothreonine
RTFSPTYGLFFRKNLLRLTG

SEQ ID NO: 2327 - protein, 20 aa, Artificial Sequence
  Description of Artificial Sequence: Synthetic peptide
  MOD_RES (2)..(2): phosphothreonine
RTHSLLLLLFFRKNLLRLTG

SEQ ID NO: 2328 - protein, 22 aa, Artificial Sequence
  Description of Artificial Sequence: Synthetic peptide
  MOD_RES (2)..(2): phosphothreonine
RTISAQDTLAYFFRKNLLRLTG

SEQ ID NO: 2329 - protein, 22 aa, Artificial Sequence
  Description of Artificial Sequence: Synthetic peptide
  MOD_RES (4)..(4): phosphoserine
RTISAQDTLAYFFRKNLLRLTG

SEQ ID NO: 2330 - protein, 22 aa, Artificial Sequence
  Description of Artificial Sequence: Synthetic peptide
  MOD_RES (4)..(4): phosphoserine
  MOD_RES (10)..(10): oxidized methionine
RTISNPEVVMKFFRKNLLRLTG

SEQ ID NO: 2331 - protein, 22 aa, Artificial Sequence
  Description of Artificial Sequence: Synthetic peptide
  MOD_RES (4)..(4): phosphoserine
RTISNPEVVMKFFRKNLLRLTG

SEQ ID NO: 2332 - protein, 20 aa, Artificial Sequence
  Description of Artificial Sequence: Synthetic peptide
  MOD_RES (4)..(4): phosphoserine
RTKSFLNYYFFRKNLLRLTG

SEQ ID NO: 2333 - protein, 24 aa, Artificial Sequence
  Description of Artificial Sequence: Synthetic peptide
  MOD_RES (4)..(4): phosphoserine
RTLSESFSRIALKFFRKNLLRLTG

SEQ ID NO: 2334 - protein, 22 aa, Artificial Sequence
  Description of Artificial Sequence: Synthetic peptide
  MOD_RES (4)..(4): phosphoserine
RTLSGSILDVYFFRKNLLRLTG

SEQ ID NO: 2335 - protein, 22 aa, Artificial Sequence
  Description of Artificial Sequence: Synthetic peptide
  MOD_RES (2)..(2): phosphothreonine
  MOD_RES (3)..(3): oxidized methionine
RTMSEAALVRKFFRKNLLRLTG

SEQ ID NO: 2336 - protein, 22 aa, Artificial Sequence
  Description of Artificial Sequence: Synthetic peptide
  MOD_RES (2)..(2): phosphothreonine
RTMSEAALVRKFFRKNLLRLTG

SEQ ID NO: 2337 - protein, 20 aa, Artificial Sequence
  Description of Artificial Sequence: Synthetic peptide
  MOD_RES (3)..(3): oxidized methionine
  MOD_RES (4)..(4): phosphoserine
RTMSPIQVLFFRKNLLRLTG

SEQ ID NO: 2338 - protein, 20 aa, Artificial Sequence
  Description of Artificial Sequence: Synthetic peptide
  MOD_RES (4)..(4): phosphoserine
RTMSPIQVLFFRKNLLRLTG

SEQ ID NO: 2339 - protein, 21 aa, Artificial Sequence
  Description of Artificial Sequence: Synthetic peptide
  MOD_RES (4)..(4): phosphoserine
RTPSPARPALFFRKNLLRLTG

SEQ ID NO: 2340 - protein, 20 aa, Artificial Sequence
  Description of Artificial Sequence: Synthetic peptide
  MOD_RES (5)..(5): phosphoserine
RTRLSPPRAFFRKNLLRLTG

SEQ ID NO: 2341 - protein, 20 aa, Artificial Sequence
  Description of Artificial Sequence: Synthetic peptide
  MOD_RES (4)..(4): phosphoserine
RTVSPAHVLFFRKNLLRLTG

SEQ ID NO: 2342 - protein, 20 aa, Artificial Sequence
  Description of Artificial Sequence: Synthetic peptide
  MOD_RES (4)..(4): phosphoserine
  MOD_RES (9)..(9): oxidized methionine
RTYSFTSAMFFRKNLLRLTG

SEQ ID NO: 2343 - protein, 20 aa, Artificial Sequence
  Description of Artificial Sequence: Synthetic peptide
  MOD_RES (4)..(4): phosphoserine
RTYSFTSAMFFRKNLLRLTG

SEQ ID NO: 2344 - protein, 20 aa, Artificial Sequence
  Description of Artificial Sequence: Synthetic peptide
  MOD_RES (6)..(6): phosphothreonine
RVASPTSGVFFRKNLLRLTG

SEQ ID NO: 2345 - protein, 19 aa, Artificial Sequence
  Description of Artificial Sequence: Synthetic peptide
  MOD_RES (7)..(7): phosphoserine
RVDSLVSLFFRKNLLRLTG

SEQ ID NO: 2346 - protein, 20 aa, Artificial Sequence
  Description of Artificial Sequence: Synthetic peptide
  MOD_RES (4)..(4): phosphoserine
  MOD_RES (7)..(7): cysteinylated cysteine
RVDSTTCLFFFRKNLLRLTG

SEQ ID NO: 2347 - protein, 20 aa, Artificial Sequence
  Description of Artificial Sequence: Synthetic peptide
  MOD_RES (5)..(5): phosphothreonine
  MOD_RES (7)..(7): cysteinylated cysteine
RVDSTTCLFFFRKNLLRLTG

SEQ ID NO: 2348 - protein, 20 aa, Artificial Sequence
  Description of Artificial Sequence: Synthetic peptide
  MOD_RES (6)..(6): phosphothreonine
  MOD_RES (7)..(7): cysteinylated cysteine
RVDSTTCLFFFRKNLLRLTG

SEQ ID NO: 2349 - protein, 22 aa, Artificial Sequence
  Description of Artificial Sequence: Synthetic peptide
  MOD_RES (4)..(4): phosphoserine
RVISLEDFMEKFFRKNLLRLTG

SEQ ID NO: 2350 - protein, 21 aa, Artificial Sequence
  Description of Artificial Sequence: Synthetic peptide
  MOD_RES (6)..(6): phosphothreonine
RVKTPTSQSYFFRKNLLRLTG

SEQ ID NO: 2351 - protein, 23 aa, Artificial Sequence
  Description of Artificial Sequence: Synthetic peptide
  MOD_RES (9)..(9): phosphoserine
RVKVDGPRSPSYFFRKNLLRLTG

SEQ ID NO: 2352 - protein, 23 aa, Artificial Sequence
  Description of Artificial Sequence: Synthetic peptide
  MOD_RES (11)..(11): phosphoserine
RVKVDGPRSPSYFFRKNLLRLTG

SEQ ID NO: 2353 - protein, 20 aa, Artificial Sequence
  Description of Artificial Sequence: Synthetic peptide
  MOD_RES (4)..(4): phosphoserine
  MOD_RES (7)..(7): oxidized methionine
RVLSPLMSRFFRKNLLRLTG

SEQ ID NO: 2354 - protein, 20 aa, Artificial Sequence
  Description of Artificial Sequence: Synthetic peptide
  MOD_RES (4)..(4): phosphoserine
RVLSPLMSRFFRKNLLRLTG

SEQ ID NO: 2355 - protein, 20 aa, Artificial Sequence
  Description of Artificial Sequence: Synthetic peptide
  MOD_RES (4)..(4): phosphoserine
RVPSINQKIFFRKNLLRLTG

SEQ ID NO: 2356 - protein, 21 aa, Artificial Sequence
  Description of Artificial Sequence: Synthetic peptide
  MOD_RES (4)..(4): phosphoserine
RVRSFLRGLPFFRKNLLRLTG

SEQ ID NO: 2357 - protein, 21 aa, Artificial Sequence
  Description of Artificial Sequence: Synthetic peptide
  MOD_RES (4)..(4): phosphoserine
RVRSPGTGAFFFRKNLLRLTG

SEQ ID NO: 2358 - protein, 20 aa, Artificial Sequence
  Description of Artificial Sequence: Synthetic peptide
  MOD_RES (3)..(3): phosphoserine
RVSSLTLHLFFRKNLLRLTG

SEQ ID NO: 2359 - protein, 20 aa, Artificial Sequence
  Description of Artificial Sequence: Synthetic peptide
  MOD_RES (4)..(4): phosphoserine
RVSSLTLHLFFRKNLLRLTG

SEQ ID NO: 2360 - protein, 20 aa, Artificial Sequence
  Description of Artificial Sequence: Synthetic peptide
  MOD_RES (6)..(6): phosphothreonine
RVSSLTLHLFFRKNLLRLTG

SEQ ID NO: 2361 - protein, 20 aa, Artificial Sequence
  Description of Artificial Sequence: Synthetic peptide
  MOD_RES (5)..(5): phosphothreonine
RVVLTPLKVFFRKNLLRLTG

SEQ ID NO: 2362 - protein, 20 aa, Artificial Sequence
  Description of Artificial Sequence: Synthetic peptide
  MOD_RES (4)..(4): phosphoserine
RVVSPGIDLFFRKNLLRLTG

SEQ ID NO: 2363 - protein, 22 aa, Artificial Sequence
  Description of Artificial Sequence: Synthetic peptide
  MOD_RES (4)..(4): phosphoserine
RVYSLDDIRRYFFRKNLLRLTG

SEQ ID NO: 2364 - protein, 20 aa, Artificial Sequence
  Description of Artificial Sequence: Synthetic peptide
  MOD_RES (4)..(4): phosphoserine
RVYSRFEVFFFRKNLLRLTG

SEQ ID NO: 2365 - protein, 22 aa, Artificial Sequence
  Description of Artificial Sequence: Synthetic peptide
  MOD_RES (5)..(5): phosphoserine
RVYYSPPVARRFFRKNLLRLTG

SEQ ID NO: 2366 - protein, 20 aa, Artificial Sequence
  Description of Artificial Sequence: Synthetic peptide
  MOD_RES (4)..(4): phosphoserine
RWNSKENLLFFRKNLLRLTG

SEQ ID NO: 2367 - protein, 21 aa, Artificial Sequence
  Description of Artificial Sequence: Synthetic peptide
  MOD_RES (6)..(6): phosphoserine
RYARYSPRQRFFRKNLLRLTG

SEQ ID NO: 2368 - protein, 20 aa, Artificial Sequence
  Description of Artificial Sequence: Synthetic peptide
  MOD_RES (4)..(4): phosphoserine
RYDSRTTIFFFRKNLLRLTG

SEQ ID NO: 2369 - protein, 20 aa, Artificial Sequence
  Description of Artificial Sequence: Synthetic peptide
  MOD_RES (5)..(5): phosphothreonine
RYFKTPRKFFFRKNLLRLTG

SEQ ID NO: 2370 - protein, 21 aa, Artificial Sequence
  Description of Artificial Sequence: Synthetic peptide
  MOD_RES (4)..(4): phosphoserine
  MOD_RES (8)..(8): oxidized methionine
RYHSLAPMYYFFRKNLLRLTG

SEQ ID NO: 2371 - protein, 21 aa, Artificial Sequence
  Description of Artificial Sequence: Synthetic peptide
  MOD_RES (4)..(4): phosphoserine
RYHSLAPMYYFFRKNLLRLTG

SEQ ID NO: 2372 - protein, 20 aa, Artificial Sequence
  Description of Artificial Sequence: Synthetic peptide
  MOD_RES (3)..(3): phosphothreonine
RYTNRVVTLFFRKNLLRLTG

SEQ ID NO: 2373 - protein, 22 aa, Artificial Sequence
  Description of Artificial Sequence: Synthetic peptide
  MOD_RES (4)..(4): phosphoserine
SAFSSRGSLSLFFRKNLLRLTG

SEQ ID NO: 2374 - protein, 20 aa, Artificial Sequence
  Description of Artificial Sequence: Synthetic peptide
  MOD_RES (1)..(1): phosphoserine
SAISPTPEIFFRKNLLRLTG

SEQ ID NO: 2375 - protein, 20 aa, Artificial Sequence
  Description of Artificial Sequence: Synthetic peptide
  MOD_RES (4)..(4): phosphoserine
SAISPTPEIFFRKNLLRLTG

SEQ ID NO: 2376 - protein, 24 aa, Artificial Sequence
  Description of Artificial Sequence: Synthetic peptide
  MOD_RES (8)..(8): phosphoserine
SAYGGLTSPGLSYFFRKNLLRLTG

SEQ ID NO: 2377 - protein, 20 aa, Artificial Sequence
  Description of Artificial Sequence: Synthetic peptide
  MOD_RES (4)..(4): phosphoserine
SEASLASALFFRKNLLRLTG

SEQ ID NO: 2378 - protein, 20 aa, Artificial Sequence
  Description of Artificial Sequence: Synthetic peptide
  MOD_RES (6)..(6): oxidized methionine
  MOD_RES (8)..(8): phosphoserine
SEFKAMDSIFFRKNLLRLTG

SEQ ID NO: 2379 - protein, 20 aa, Artificial Sequence
  Description of Artificial Sequence: Synthetic peptide
  MOD_RES (4)..(4): phosphoserine
SEFSDVDKLFFRKNLLRLTG

SEQ ID NO: 2380 - protein, 22 aa, Artificial Sequence
  Description of Artificial Sequence: Synthetic peptide
  MOD_RES (4)..(4): phosphoserine
SEISPIKGSVRFFRKNLLRLTG

SEQ ID NO: 2381 - protein, 21 aa, Artificial Sequence
  Description of Artificial Sequence: Synthetic peptide
  MOD_RES (5)..(5): phosphoserine
SELRSPRISYFFRKNLLRLTG

SEQ ID NO: 2382 - protein, 20 aa, Artificial Sequence
  Description of Artificial Sequence: Synthetic peptide
  MOD_RES (4)..(4): phosphothreonine
SELTPSESLFFRKNLLRLTG

SEQ ID NO: 2383 - protein, 20 aa, Artificial Sequence
  Description of Artificial Sequence: Synthetic peptide
  MOD_RES (6)..(6): phosphoserine
SELTPSESLFFRKNLLRLTG

SEQ ID NO: 2384 - protein, 21 aa, Artificial Sequence
  Description of Artificial Sequence: Synthetic peptide
  MOD_RES (3)..(3): phosphoserine
SESSIKKKFLFFRKNLLRLTG

SEQ ID NO: 2385 - protein, 21 aa, Artificial Sequence
  Description of Artificial Sequence: Synthetic peptide
  MOD_RES (4)..(4): phosphoserine
SESSIKKKFLFFRKNLLRLTG

SEQ ID NO: 2386 - protein, 20 aa, Artificial Sequence
  Description of Artificial Sequence: Synthetic peptide
  MOD_RES (4)..(4): phosphoserine
SFDSREASFFFRKNLLRLTG

SEQ ID NO: 2387 - protein, 24 aa, Artificial Sequence
  Description of Artificial Sequence: Synthetic peptide
  MOD_RES (4)..(4): phosphoserine
SFLSQDESHDHSFFFRKNLLRLTG

SEQ ID NO: 2388 - protein, 25 aa, Artificial Sequence
  Description of Artificial Sequence: Synthetic peptide
  MOD_RES (1)..(1): phosphoserine
SGEGDFLAEGGGVRFFRKNLLRLTG

SEQ ID NO: 2389 - protein, 20 aa, Artificial Sequence
  Description of Artificial Sequence: Synthetic peptide
  MOD_RES (5)..(5): phosphoserine
  MOD_RES (9)..(9): oxidized tryptophan
SGFRSPHLWFFRKNLLRLTG

SEQ ID NO: 2390 - protein, 20 aa, Artificial Sequence
  Description of Artificial Sequence: Synthetic peptide
  MOD_RES (5)..(5): phosphoserine
SGFRSPHLWFFRKNLLRLTG

SEQ ID NO: 2391 - protein, 20 aa, Artificial Sequence
  Description of Artificial Sequence: Synthetic peptide
  MOD_RES (5)..(5): phosphoserine
SIDISQDKLFFRKNLLRLTG

SEQ ID NO: 2392 - protein, 20 aa, Artificial Sequence
  Description of Artificial Sequence: Synthetic peptide
  MOD_RES (1)..(1): phosphoserine
SIDSPKSYIFFRKNLLRLTG

SEQ ID NO: 2393 - protein, 20 aa, Artificial Sequence
  Description of Artificial Sequence: Synthetic peptide
  MOD_RES (5)..(5): phosphothreonine
SIFRTPISKFFRKNLLRLTG

SEQ ID NO: 2394 - protein, 19 aa, Artificial Sequence
  Description of Artificial Sequence: Synthetic peptide
  MOD_RES (7)..(7): phosphothreonine
SIIKEKTVFFRKNLLRLTG

SEQ ID NO: 2395 - protein, 22 aa, Artificial Sequence
  Description of Artificial Sequence: Synthetic peptide
  MOD_RES (4)..(4): phosphoserine
SIISPKVKMALFFRKNLLRLTG

SEQ ID NO: 2396 - protein, 20 aa, Artificial Sequence
  Description of Artificial Sequence: Synthetic peptide
  MOD_RES (4)..(4): phosphoserine
SIISPNFSFFFRKNLLRLTG

SEQ ID NO: 2397 - protein, 20 aa, Artificial Sequence
  Description of Artificial Sequence: Synthetic peptide
  MOD_RES (4)..(4): phosphoserine
SILSRTPSVFFRKNLLRLTG

SEQ ID NO: 2398 - protein, 20 aa, Artificial Sequence
  Description of Artificial Sequence: Synthetic peptide
  MOD_RES (1)..(1): phosphoserine
SIPSLVDGFFFRKNLLRLTG

SEQ ID NO: 2399 - protein, 20 aa, Artificial Sequence
  Description of Artificial Sequence: Synthetic peptide
  MOD_RES (4)..(4): phosphoserine
SIPSLVDGFFFRKNLLRLTG

SEQ ID NO: 2400 - protein, 20 aa, Artificial Sequence
  Description of Artificial Sequence: Synthetic peptide
  MOD_RES (6)..(6): phosphoserine
SIPTVSGQIFFRKNLLRLTG

SEQ ID NO: 2401 - protein, 20 aa, Artificial Sequence
  Description of Artificial Sequence: Synthetic peptide
  MOD_RES (4)..(4): phosphoserine
SISSIDRELFFRKNLLRLTG

SEQ ID NO: 2402 - protein, 20 aa, Artificial Sequence
  Description of Artificial Sequence: Synthetic peptide
  MOD_RES (4)..(4): phosphoserine
  MOD_RES (5)..(5): oxidized methionine
SISSMEVNVFFRKNLLRLTG

SEQ ID NO: 2403 - protein, 19 aa, Artificial Sequence
  Description of Artificial Sequence: Synthetic peptide
  MOD_RES (3)..(3): phosphoserine
SISTLVTLFFRKNLLRLTG

SEQ ID NO: 2404 - protein, 19 aa, Artificial Sequence
  Description of Artificial Sequence: Synthetic peptide
  MOD_RES (4)..(4): phosphothreonine
SISTLVTLFFRKNLLRLTG

SEQ ID NO: 2405 - protein, 20 aa, Artificial Sequence
  Description of Artificial Sequence: Synthetic peptide
  MOD_RES (3)..(3): phosphothreonine
SITSLEAIIFFRKNLLRLTG

SEQ ID NO: 2406 - protein, 22 aa, Artificial Sequence
  Description of Artificial Sequence: Synthetic peptide
  MOD_RES (4)..(4): phosphoserine
SIVSPRKLPALFFRKNLLRLTG

SEQ ID NO: 2407 - protein, 21 aa, Artificial Sequence
  Description of Artificial Sequence: Synthetic peptide
  MOD_RES (7)..(7): phosphothreonine
SKMAFLTRVAFFRKNLLRLTG

SEQ ID NO: 2408 - protein, 20 aa, Artificial Sequence
  Description of Artificial Sequence: Synthetic peptide
  MOD_RES (4)..(4): phosphoserine
SLASKVTRLFFRKNLLRLTG

SEQ ID NO: 2409 - protein, 20 aa, Artificial Sequence
  Description of Artificial Sequence: Synthetic peptide
  MOD_RES (4)..(4): phosphoserine
SLASLLAKVFFRKNLLRLTG

SEQ ID NO: 2410 - protein, 23 aa, Artificial Sequence
  Description of Artificial Sequence: Synthetic peptide
  MOD_RES (4)..(4): phosphoserine
  MOD_RES (10)..(10): oxidized methionine
SLDSPGPEKMALFFRKNLLRLTG

SEQ ID NO: 2411 - protein, 23 aa, Artificial Sequence
  Description of Artificial Sequence: Synthetic peptide
  MOD_RES (4)..(4): phosphoserine
SLDSPGPEKMALFFRKNLLRLTG

SEQ ID NO: 2412 - protein, 20 aa, Artificial Sequence
  Description of Artificial Sequence: Synthetic peptide
  MOD_RES (5)..(5): phosphoserine
SLFGSPVAKFFRKNLLRLTG

SEQ ID NO: 2413 - protein, 20 aa, Artificial Sequence
  Description of Artificial Sequence: Synthetic peptide
  MOD_RES (5)..(5): phosphothreonine
SLFHTPKFVFFRKNLLRLTG

SEQ ID NO: 2414 - protein, 23 aa, Artificial Sequence
  Description of Artificial Sequence: Synthetic peptide
  MOD_RES (5)..(5): phosphoserine
SLFSSEESNLGAFFRKNLLRLTG

SEQ ID NO: 2415 - protein, 20 aa, Artificial Sequence
  Description of Artificial Sequence: Synthetic peptide
  MOD_RES (4)..(4): phosphoserine
SLLSELQHAFFRKNLLRLTG

SEQ ID NO: 2416 - protein, 20 aa, Artificial Sequence
  Description of Artificial Sequence: Synthetic peptide
  MOD_RES (4)..(4): phosphoserine
SLLSLSATVFFRKNLLRLTG

SEQ ID NO: 2417 - protein, 20 aa, Artificial Sequence
  Description of Artificial Sequence: Synthetic peptide
  MOD_RES (4)..(4): phosphoserine
SLLSVSHALFFRKNLLRLTG

SEQ ID NO: 2418 - protein, 22 aa, Artificial Sequence
  Description of Artificial Sequence: Synthetic peptide
  MOD_RES (4)..(4): phosphothreonine
SLLTPVRLPSIFFRKNLLRLTG

SEQ ID NO: 2419 - protein, 21 aa, Artificial Sequence
  Description of Artificial Sequence: Synthetic peptide
  MOD_RES (3)..(3): oxidized methionine
  MOD_RES (4)..(4): phosphoserine
SLMSGTLESLFFRKNLLRLTG

SEQ ID NO: 2420 - protein, 21 aa, Artificial Sequence
  Description of Artificial Sequence: Synthetic peptide
  MOD_RES (3)..(3): oxidized methionine
  MOD_RES (6)..(6): phosphothreonine
SLMSGTLESLFFRKNLLRLTG

SEQ ID NO: 2421 - protein, 21 aa, Artificial Sequence
  Description of Artificial Sequence: Synthetic peptide
  MOD_RES (6)..(6): phosphothreonine
SLMSGTLESLFFRKNLLRLTG

SEQ ID NO: 2422 - protein, 20 aa, Artificial Sequence
  Description of Artificial Sequence: Synthetic peptide
  MOD_RES (4)..(4): phosphoserine
SLSSERYYLFFRKNLLRLTG

SEQ ID NO: 2423 - protein, 22 aa, Artificial Sequence
  Description of Artificial Sequence: Synthetic peptide
  MOD_RES (3)..(3): phosphoserine
SLSSLRAHLEYFFRKNLLRLTG

SEQ ID NO: 2424 - protein, 22 aa, Artificial Sequence
  Description of Artificial Sequence: Synthetic peptide
  MOD_RES (4)..(4): phosphoserine
SLSSLRAHLEYFFRKNLLRLTG

SEQ ID NO: 2425 - protein, 22 aa, Artificial Sequence
  Description of Artificial Sequence: Synthetic peptide
  MOD_RES (2)..(2): oxidized methionine
  MOD_RES (4)..(4): phosphoserine
SMKSPLYLVSRFFRKNLLRLTG

SEQ ID NO: 2426 - protein, 22 aa, Artificial Sequence
  Description of Artificial Sequence: Synthetic peptide
  MOD_RES (4)..(4): phosphoserine
SMKSPLYLVSRFFRKNLLRLTG

SEQ ID NO: 2427 - protein, 20 aa, Artificial Sequence
  Description of Artificial Sequence: Synthetic peptide
  MOD_RES (8)..(8): phosphoserine
SPAARSLSLFFRKNLLRLTG

SEQ ID NO: 2428 - protein, 20 aa, Artificial Sequence
  Description of Artificial Sequence: Synthetic peptide
  MOD_RES (4)..(4): phosphoserine
SPASPLKELFFRKNLLRLTG

SEQ ID NO: 2429 - protein, 22 aa, Artificial Sequence
  Description of Artificial Sequence: Synthetic peptide
  MOD_RES (5)..(5): phosphoserine
SPDISPPIFRRFFRKNLLRLTG

SEQ ID NO: 2430 - protein, 19 aa, Artificial Sequence
  Description of Artificial Sequence: Synthetic peptide
  MOD_RES (8)..(8): phosphoserine
SPFKRQLSFFRKNLLRLTG

SEQ ID NO: 2431 - protein, 20 aa, Artificial Sequence
  Description of Artificial Sequence: Synthetic peptide
  MOD_RES (8)..(8): phosphoserine
SPFLSKRSLFFRKNLLRLTG

SEQ ID NO: 2432 - protein, 21 aa, Artificial Sequence
  Description of Artificial Sequence: Synthetic peptide
  MOD_RES (7)..(7): phosphoserine
SPFSSRSPSLFFRKNLLRLTG

SEQ ID NO: 2433 - protein, 21 aa, Artificial Sequence
  Description of Artificial Sequence: Synthetic peptide
  MOD_RES (4)..(4): phosphoserine
SPGSPWKTKLFFRKNLLRLTG

SEQ ID NO: 2434 - protein, 20 aa, Artificial Sequence
  Description of Artificial Sequence: Synthetic peptide
  MOD_RES (1)..(1): phosphoserine
SPHSPFYQLFFRKNLLRLTG

SEQ ID NO: 2435 - protein, 20 aa, Artificial Sequence
  Description of Artificial Sequence: Synthetic peptide
  MOD_RES (4)..(4): phosphoserine
SPHSPFYQLFFRKNLLRLTG

SEQ ID NO: 2436 - protein, 21 aa, Artificial Sequence
  Description of Artificial Sequence: Synthetic peptide
  MOD_RES (4)..(4): phosphoserine
SPISDEEERLFFRKNLLRLTG

SEQ ID NO: 2437 - protein, 22 aa, Artificial Sequence
  Description of Artificial Sequence: Synthetic peptide
  MOD_RES (4)..(4): phosphoserine
SPISPRTQDALFFRKNLLRLTG

SEQ ID NO: 2438 - protein, 22 aa, Artificial Sequence
  Description of Artificial Sequence: Synthetic peptide
  MOD_RES (4)..(4): phosphoserine
SPISPTRQDALFFRKNLLRLTG

SEQ ID NO: 2439 - protein, 21 aa, Artificial Sequence
  Description of Artificial Sequence: Synthetic peptide
  MOD_RES (6)..(6): phosphoserine
SPITSSPPKWFFRKNLLRLTG

SEQ ID NO: 2440 - protein, 20 aa, Artificial Sequence
  Description of Artificial Sequence: Synthetic peptide
  MOD_RES (6)..(6): phosphothreonine
SPKPPTRSPFFRKNLLRLTG

SEQ ID NO: 2441 - protein, 20 aa, Artificial Sequence
  Description of Artificial Sequence: Synthetic peptide
  MOD_RES (8)..(8): phosphoserine
SPKPPTRSPFFRKNLLRLTG

SEQ ID NO: 2442 - protein, 21 aa, Artificial Sequence
  Description of Artificial Sequence: Synthetic peptide
  MOD_RES (4)..(4): phosphoserine
SPPSPARWSLFFRKNLLRLTG

SEQ ID NO: 2443 - protein, 19 aa, Artificial Sequence
  Description of Artificial Sequence: Synthetic peptide
  MOD_RES (6)..(6): phosphoserine
SPRAGSPFFFRKNLLRLTG

SEQ ID NO: 2444 - protein, 28 aa, Artificial Sequence
  Description of Artificial Sequence: Synthetic peptide
  MOD_RES (6)..(6): phosphoserine
SPRAGSPFSPPPSSSSLFFRKNLLRLTG

SEQ ID NO: 2445 - protein, 23 aa, Artificial Sequence
  Description of Artificial Sequence: Synthetic peptide
  MOD_RES (6)..(6): phosphoserine
SPRLVSRSSSVLFFRKNLLRLTG

SEQ ID NO: 2446 - protein, 21 aa, Artificial Sequence
  Description of Artificial Sequence: Synthetic peptide
  MOD_RES (9)..(9): phosphoserine
SPRPPNSPSIFFRKNLLRLTG

SEQ ID NO: 2447 - protein, 23 aa, Artificial Sequence
  Description of Artificial Sequence: Synthetic peptide
  MOD_RES (7)..(7): phosphoserine
SPRPPNSPSISIFFRKNLLRLTG

SEQ ID NO: 2448 - protein, 21 aa, Artificial Sequence
  Description of Artificial Sequence: Synthetic peptide
  MOD_RES (5)..(5): phosphothreonine
SPRPTSAPAIFFRKNLLRLTG

SEQ ID NO: 2449 - protein, 21 aa, Artificial Sequence
  Description of Artificial Sequence: Synthetic peptide
  MOD_RES (6)..(6): phosphoserine
SPRPTSAPAIFFRKNLLRLTG

SEQ ID NO: 2450 - protein, 22 aa, Artificial Sequence
  Description of Artificial Sequence: Synthetic peptide
  MOD_RES (6)..(6): phosphoserine
SPRRPSRVSEFFFRKNLLRLTG

SEQ ID NO: 2451 - protein, 23 aa, Artificial Sequence
  Description of Artificial Sequence: Synthetic peptide
  MOD_RES (6)..(6): phosphoserine
SPRRPSRVSEFLFFRKNLLRLTG

SEQ ID NO: 2452 - protein, 21 aa, Artificial Sequence
  Description of Artificial Sequence: Synthetic peptide
  MOD_RES (1)..(1): phosphoserine
SPRSPISPELFFRKNLLRLTG

SEQ ID NO: 2453 - protein, 21 aa, Artificial Sequence
  Description of Artificial Sequence: Synthetic peptide
  MOD_RES (4)..(4): phosphoserine
SPRSPISPELFFRKNLLRLTG

SEQ ID NO: 2454 - protein, 21 aa, Artificial Sequence
  Description of Artificial Sequence: Synthetic peptide
  MOD_RES (1)..(1): phosphoserine
SPRSPSTTYLFFRKNLLRLTG

SEQ ID NO: 2455 - protein, 20 aa, Artificial Sequence
  Description of Artificial Sequence: Synthetic peptide
  MOD_RES (4)..(4): phosphoserine
SPRSPTTTLFFRKNLLRLTG

SEQ ID NO: 2456 - protein, 22 aa, Artificial Sequence
  Description of Artificial Sequence: Synthetic peptide
  MOD_RES (4)..(4): phosphoserine
SPRSPVNKTTLFFRKNLLRLTG

SEQ ID NO: 2457 - protein, 21 aa, Artificial Sequence
  Description of Artificial Sequence: Synthetic peptide
  MOD_RES (1)..(1): phosphoserine
SPRSPVPTTLFFRKNLLRLTG

SEQ ID NO: 2458 - protein, 21 aa, Artificial Sequence
  Description of Artificial Sequence: Synthetic peptide
  MOD_RES (4)..(4): phosphoserine
SPRSPVPTTLFFRKNLLRLTG

SEQ ID NO: 2459 - protein, 21 aa, Artificial Sequence
  Description of Artificial Sequence: Synthetic peptide
  MOD_RES (1)..(1): phosphoserine
SPRTPPPLTVFFRKNLLRLTG

SEQ ID NO: 2460 - protein, 21 aa, Artificial Sequence
  Description of Artificial Sequence: Synthetic peptide
  MOD_RES (4)..(4): phosphothreonine
SPRTPPPLTVFFRKNLLRLTG

SEQ ID NO: 2461 - protein, 23 aa, Artificial Sequence
  Description of Artificial Sequence: Synthetic peptide
  MOD_RES (6)..(6): phosphothreonine
SPRTPTPFKHALFFRKNLLRLTG

SEQ ID NO: 2462 - protein, 22 aa, Artificial Sequence
  Description of Artificial Sequence: Synthetic peptide
  MOD_RES (4)..(4): phosphothreonine
SPRTPVSPVKFFFRKNLLRLTG

SEQ ID NO: 2463 - protein, 20 aa, Artificial Sequence
  Description of Artificial Sequence: Synthetic peptide
  MOD_RES (3)..(3): phosphoserine
SPSPLPVALFFRKNLLRLTG

SEQ ID NO: 2464 - protein, 20 aa, Artificial Sequence
  Description of Artificial Sequence: Synthetic peptide
  MOD_RES (3)..(3): phosphoserine
  MOD_RES (5)..(5): oxidized methionine
SPSPMDPHMFFRKNLLRLTG

SEQ ID NO: 2465 - protein, 20 aa, Artificial Sequence
  Description of Artificial Sequence: Synthetic peptide
  MOD_RES (3)..(3): phosphoserine
  MOD_RES (9)..(9): oxidized methionine
SPSPMDPHMFFRKNLLRLTG

SEQ ID NO: 2466 - protein, 20 aa, Artificial Sequence
  Description of Artificial Sequence: Synthetic peptide
  MOD_RES (3)..(3): phosphoserine
SPSPMDPHMFFRKNLLRLTG

SEQ ID NO: 2467 - protein, 20 aa, Artificial Sequence
  Description of Artificial Sequence: Synthetic peptide
  MOD_RES (3)..(3): phosphothreonine
SPTSPDYSLFFRKNLLRLTG

SEQ ID NO: 2468 - protein, 20 aa, Artificial Sequence
  Description of Artificial Sequence: Synthetic peptide
  MOD_RES (3)..(3): phosphothreonine
SPTSPFSSLFFRKNLLRLTG

SEQ ID NO: 2469 - protein, 20 aa, Artificial Sequence
  Description of Artificial Sequence: Synthetic peptide
  MOD_RES (4)..(4): phosphoserine
SPTSPFSSLFFRKNLLRLTG

SEQ ID NO: 2470 - protein, 22 aa, Artificial Sequence
  Description of Artificial Sequence: Synthetic peptide
  MOD_RES (10)..(10): phosphoserine
SPVNKVRRVSFFFRKNLLRLTG

SEQ ID NO: 2471 - protein, 21 aa, Artificial Sequence
  Description of Artificial Sequence: Synthetic peptide
  MOD_RES (4)..(4): phosphoserine
SPVSPKSLAFFFRKNLLRLTG

SEQ ID NO: 2472 - protein, 20 aa, Artificial Sequence
  Description of Artificial Sequence: Synthetic peptide
  MOD_RES (4)..(4): phosphoserine
  MOD_RES (6)..(6): oxidized methionine
SPVSPMKELFFRKNLLRLTG

SEQ ID NO: 2473 - protein, 19 aa, Artificial Sequence
  Description of Artificial Sequence: Synthetic peptide
  MOD_RES (4)..(4): phosphoserine
  MOD_RES (8)..(8): oxidized methionine
SQDSPIFMFFRKNLLRLTG

SEQ ID NO: 2474 - protein, 19 aa, Artificial Sequence
  Description of Artificial Sequence: Synthetic peptide
  MOD_RES (4)..(4): phosphoserine
SQDSPIFMFFRKNLLRLTG

SEQ ID NO: 2475 - protein, 20 aa, Artificial Sequence
  Description of Artificial Sequence: Synthetic peptide
  MOD_RES (8)..(8): phosphoserine
SQILRTPSLFFRKNLLRLTG

SEQ ID NO: 2476 - protein, 21 aa, Artificial Sequence
  Description of Artificial Sequence: Synthetic peptide
  MOD_RES (5)..(5): phosphoserine
SRFHSPSTTWFFRKNLLRLTG

SEQ ID NO: 2477 - protein, 20 aa, Artificial Sequence
  Description of Artificial Sequence: Synthetic peptide
  MOD_RES (4)..(4): phosphoserine
SRFSGGFGAFFRKNLLRLTG

SEQ ID NO: 2478 - protein, 23 aa, Artificial Sequence
  Description of Artificial Sequence: Synthetic peptide
  MOD_RES (4)..(4): phosphoserine
SRFSGGFGARDYFFRKNLLRLTG

SEQ ID NO: 2479 - protein, 21 aa, Artificial Sequence
  Description of Artificial Sequence: Synthetic peptide
  MOD_RES (4)..(4): phosphoserine
SRHSGPFFTFFFRKNLLRLTG

SEQ ID NO: 2480 - protein, 22 aa, Artificial Sequence
  Description of Artificial Sequence: Synthetic peptide
  MOD_RES (5)..(5): phosphoserine
SRKESYSVYVYFFRKNLLRLTG

SEQ ID NO: 2481 - protein, 20 aa, Artificial Sequence
  Description of Artificial Sequence: Synthetic peptide
  MOD_RES (4)..(4): phosphoserine
SRKSFVFELFFRKNLLRLTG

SEQ ID NO: 2482 - protein, 18 aa, Artificial Sequence
  Description of Artificial Sequence: Synthetic peptide
  MOD_RES (4)..(4): phosphoserine
SRLSLRRFFRKNLLRLTG

SEQ ID NO: 2483 - protein, 20 aa, Artificial Sequence
  Description of Artificial Sequence: Synthetic peptide
  MOD_RES (4)..(4): phosphoserine
SRLSLRRSLFFRKNLLRLTG

SEQ ID NO: 2484 - protein, 21 aa, Artificial Sequence
  Description of Artificial Sequence: Synthetic peptide
  MOD_RES (5)..(5): oxidized methionine
  MOD_RES (6)..(6): phosphoserine
SRPSMSPTPLFFRKNLLRLTG

SEQ ID NO: 2485 - protein, 21 aa, Artificial Sequence
  Description of Artificial Sequence: Synthetic peptide
  MOD_RES (6)..(6): phosphoserine
SRPSMSPTPLFFRKNLLRLTG

SEQ ID NO: 2486 - protein, 20 aa, Artificial Sequence
  Description of Artificial Sequence: Synthetic peptide
  MOD_RES (4)..(4): phosphoserine
SRRSIFEMYFFRKNLLRLTG

SEQ ID NO: 2487 - protein, 19 aa, Artificial Sequence
  Description of Artificial Sequence: Synthetic peptide
  MOD_RES (4)..(4): phosphoserine
SRSSPLKLFFRKNLLRLTG

SEQ ID NO: 2488 - protein, 22 aa, Artificial Sequence
  Description of Artificial Sequence: Synthetic peptide
  MOD_RES (4)..(4): phosphoserine
SSISPSTLTLKFFRKNLLRLTG

SEQ ID NO: 2489 - protein, 22 aa, Artificial Sequence
  Description of Artificial Sequence: Synthetic peptide
  MOD_RES (4)..(4): phosphoserine
SSLSGEELVTKFFRKNLLRLTG

SEQ ID NO: 2490 - protein, 21 aa, Artificial Sequence
  Description of Artificial Sequence: Synthetic peptide
  MOD_RES (5)..(5): phosphoserine
SSLSSPLNPKFFRKNLLRLTG

SEQ ID NO: 2491 - protein, 20 aa, Artificial Sequence
  Description of Artificial Sequence: Synthetic peptide
  MOD_RES (4)..(4): phosphoserine
SSSSPFKFKFFRKNLLRLTG

SEQ ID NO: 2492 - protein, 23 aa, Artificial Sequence
  Description of Artificial Sequence: Synthetic peptide
  MOD_RES (4)..(4): phosphoserine
STASAITPSVSRFFRKNLLRLTG

SEQ ID NO: 2493 - protein, 21 aa, Artificial Sequence
  Description of Artificial Sequence: Synthetic peptide
  MOD_RES (9)..(9): phosphoserine
STGGGTVISRFFRKNLLRLTG

SEQ ID NO: 2494 - protein, 20 aa, Artificial Sequence
  Description of Artificial Sequence: Synthetic peptide
  MOD_RES (3)..(3): phosphoserine
STSLEKNNVFFRKNLLRLTG

SEQ ID NO: 2495 - protein, 21 aa, Artificial Sequence
  Description of Artificial Sequence: Synthetic peptide
  MOD_RES (4)..(4): phosphoserine
SVFSPSFGLKFFRKNLLRLTG

SEQ ID NO: 2496 - protein, 20 aa, Artificial Sequence
  Description of Artificial Sequence: Synthetic peptide
  MOD_RES (4)..(4): phosphoserine
SVISDDSVLFFRKNLLRLTG

SEQ ID NO: 2497 - protein, 20 aa, Artificial Sequence
  Description of Artificial Sequence: Synthetic peptide
  MOD_RES (4)..(4): phosphoserine
SVISGISSRFFRKNLLRLTG

SEQ ID NO: 2498 - protein, 20 aa, Artificial Sequence
  Description of Artificial Sequence: Synthetic peptide
  MOD_RES (5)..(5): phosphoserine
SVISSPLLKFFRKNLLRLTG

SEQ ID NO: 2499 - protein, 20 aa, Artificial Sequence
  Description of Artificial Sequence: Synthetic peptide
  MOD_RES (4)..(4): phosphoserine
SVLSPLLNKFFRKNLLRLTG

SEQ ID NO: 2500 - protein, 21 aa, Artificial Sequence
  Description of Artificial Sequence: Synthetic peptide
  MOD_RES (4)..(4): phosphoserine
SVLSPTSWEKFFRKNLLRLTG

SEQ ID NO: 2501 - protein, 20 aa, Artificial Sequence
  Description of Artificial Sequence: Synthetic peptide
  MOD_RES (4)..(4): phosphoserine
SVLSYTSVRFFRKNLLRLTG

SEQ ID NO: 2502 - protein, 20 aa, Artificial Sequence
  Description of Artificial Sequence: Synthetic peptide
  MOD_RES (4)..(4): phosphothreonine
SVLTPLLLRFFRKNLLRLTG

SEQ ID NO: 2503 - protein, 23 aa, Artificial Sequence
  Description of Artificial Sequence: Synthetic peptide
  MOD_RES (8)..(8): phosphoserine
SVPEFPLSPPKKFFRKNLLRLTG

SEQ ID NO: 2504 - protein, 22 aa, Artificial Sequence
  Description of Artificial Sequence: Synthetic peptide
  MOD_RES (4)..(4): phosphoserine
SVQSDQGYISRFFRKNLLRLTG

SEQ ID NO: 2505 - protein, 20 aa, Artificial Sequence
  Description of Artificial Sequence: Synthetic peptide
  MOD_RES (4)..(4): phosphoserine
SVSSLEVHFFFRKNLLRLTG

SEQ ID NO: 2506 - protein, 20 aa, Artificial Sequence
  Description of Artificial Sequence: Synthetic peptide
  MOD_RES (4)..(4): phosphoserine
  MOD_RES (8)..(8): oxidized methionine
SVTSPIKMKFFRKNLLRLTG

SEQ ID NO: 2507 - protein, 20 aa, Artificial Sequence
  Description of Artificial Sequence: Synthetic peptide
  MOD_RES (4)..(4): phosphoserine
SVTSPIKMKFFRKNLLRLTG

SEQ ID NO: 2508 - protein, 23 aa, Artificial Sequence
  Description of Artificial Sequence: Synthetic peptide
  MOD_RES (4)..(4): phosphoserine
SVVSFDKVKEPRFFRKNLLRLTG

SEQ ID NO: 2509 - protein, 23 aa, Artificial Sequence
  Description of Artificial Sequence: Synthetic peptide
  MOD_RES (4)..(4): phosphoserine
SVVSGSEMSGKYFFRKNLLRLTG

SEQ ID NO: 2510 - protein, 22 aa, Artificial Sequence
  Description of Artificial Sequence: Synthetic peptide
  MOD_RES (4)..(4): phosphoserine
SVYSPSGPVNRFFRKNLLRLTG

SEQ ID NO: 2511 - protein, 22 aa, Artificial Sequence
  Description of Artificial Sequence: Synthetic peptide
  MOD_RES (6)..(6): phosphoserine
SVYSPSGPVNRFFRKNLLRLTG

SEQ ID NO: 2512 - protein, 21 aa, Artificial Sequence
  Description of Artificial Sequence: Synthetic peptide
  MOD_RES (4)..(4): phosphoserine
SYPSPVPTSFFFRKNLLRLTG

SEQ ID NO: 2513 - protein, 24 aa, Artificial Sequence
  Description of Artificial Sequence: Synthetic peptide
  MOD_RES (11)..(11): phosphoserine
SYVTTSTRTYSLGFFRKNLLRLTG

SEQ ID NO: 2514 - protein, 22 aa, Artificial Sequence
  Description of Artificial Sequence: Synthetic peptide
  MOD_RES (4)..(4): phosphoserine
SYYSPSIGFSYFFRKNLLRLTG

SEQ ID NO: 2515 - protein, 20 aa, Artificial Sequence
  Description of Artificial Sequence: Synthetic peptide
  MOD_RES (4)..(4): phosphoserine
TAISPPLSVFFRKNLLRLTG

SEQ ID NO: 2516 - protein, 20 aa, Artificial Sequence
  Description of Artificial Sequence: Synthetic peptide
  MOD_RES (8)..(8): phosphoserine
TELPKRLSLFFRKNLLRLTG

SEQ ID NO: 2517 - protein, 24 aa, Artificial Sequence
  Description of Artificial Sequence: Synthetic peptide
  MOD_RES (4)..(4): phosphoserine
  MOD_RES (13)..(13): oxidized tryptophan
TESSPGSRQIQLWFFRKNLLRLTG

SEQ ID NO: 2518 - protein, 24 aa, Artificial Sequence
  Description of Artificial Sequence: Synthetic peptide
  MOD_RES (4)..(4): phosphoserine
TESSPGSRQIQLWFFRKNLLRLTG

SEQ ID NO: 2519 - protein, 20 aa, Artificial Sequence
  Description of Artificial Sequence: Synthetic peptide
  MOD_RES (4)..(4): phosphoserine
TEVSPSRTIFFRKNLLRLTG

SEQ ID NO: 2520 - protein, 21 aa, Artificial Sequence
  Description of Artificial Sequence: Synthetic peptide
  MOD_RES (7)..(7): phosphoserine
THALPESPRLFFRKNLLRLTG

SEQ ID NO: 2521 - protein, 19 aa, Artificial Sequence
  Description of Artificial Sequence: Synthetic peptide
  MOD_RES (4)..(4): phosphoserine
  MOD_RES (7)..(7): cysteinylated cysteine
THDSPFCLFFRKNLLRLTG

SEQ ID NO: 2522 - protein, 20 aa, Artificial Sequence
  Description of Artificial Sequence: Synthetic peptide
  MOD_RES (4)..(4): phosphoserine
THISPNAIFFFRKNLLRLTG

SEQ ID NO: 2523 - protein, 22 aa, Artificial Sequence
  Description of Artificial Sequence: Synthetic peptide
  MOD_RES (4)..(4): phosphoserine
THISPNAIFKAFFRKNLLRLTG

SEQ ID NO: 2524 - protein, 21 aa, Artificial Sequence
  Description of Artificial Sequence: Synthetic peptide
  MOD_RES (4)..(4): phosphoserine
TIFSPEGRLYFFRKNLLRLTG

SEQ ID NO: 2525 - protein, 20 aa, Artificial Sequence
  Description of Artificial Sequence: Synthetic peptide
  MOD_RES (3)..(3): oxidized methionine
  MOD_RES (4)..(4): phosphoserine
TIMSPAVLKFFRKNLLRLTG

SEQ ID NO: 2526 - protein, 20 aa, Artificial Sequence
  Description of Artificial Sequence: Synthetic peptide
  MOD_RES (4)..(4): phosphoserine
TIMSPAVLKFFRKNLLRLTG

SEQ ID NO: 2527 - protein, 20 aa, Artificial Sequence
  Description of Artificial Sequence: Synthetic peptide
  MOD_RES (6)..(6): phosphothreonine
TIRSPTTVLFFRKNLLRLTG

SEQ ID NO: 2528 - protein, 20 aa, Artificial Sequence
  Description of Artificial Sequence: Synthetic peptide
  MOD_RES (4)..(4): phosphoserine
TLASPSVFKFFRKNLLRLTG

SEQ ID NO: 2529 - protein, 20 aa, Artificial Sequence
  Description of Artificial Sequence: Synthetic peptide
  MOD_RES (5)..(5): phosphoserine
  MOD_RES (7)..(7): oxidized methionine
TLLASPMLKFFRKNLLRLTG

SEQ ID NO: 2530 - protein, 22 aa, Artificial Sequence
  Description of Artificial Sequence: Synthetic peptide
  MOD_RES (4)..(4): phosphoserine
TLLSAAHEVELFFRKNLLRLTG

SEQ ID NO: 2531 - protein, 20 aa, Artificial Sequence
  Description of Artificial Sequence: Synthetic peptide
  MOD_RES (4)..(4): phosphoserine
TLLSPKHKYFFRKNLLRLTG

SEQ ID NO: 2532 - protein, 22 aa, Artificial Sequence
  Description of Artificial Sequence: Synthetic peptide
  MOD_RES (4)..(4): phosphoserine
TLPSPDKLPGFFFRKNLLRLTG

SEQ ID NO: 2533 - protein, 21 aa, Artificial Sequence
  Description of Artificial Sequence: Synthetic peptide
  MOD_RES (7)..(7): phosphothreonine
TLSCPVTEVIFFRKNLLRLTG

SEQ ID NO: 2534 - protein, 20 aa, Artificial Sequence
  Description of Artificial Sequence: Synthetic peptide
  MOD_RES (3)..(3): phosphoserine
TLSSIRHMIFFRKNLLRLTG

SEQ ID NO: 2535 - protein, 20 aa, Artificial Sequence
  Description of Artificial Sequence: Synthetic peptide
  MOD_RES (4)..(4): phosphoserine
  MOD_RES (8)..(8): oxidized methionine
TLSSIRHMIFFRKNLLRLTG

SEQ ID NO: 2536 - protein, 20 aa, Artificial Sequence
  Description of Artificial Sequence: Synthetic peptide
  MOD_RES (4)..(4): phosphoserine
TLSSIRHMIFFRKNLLRLTG

SEQ ID NO: 2537 - protein, 20 aa, Artificial Sequence
  Description of Artificial Sequence: Synthetic peptide
  MOD_RES (8)..(8): phosphoserine
TLYPRSFSVFFRKNLLRLTG

SEQ ID NO: 2538 - protein, 20 aa, Artificial Sequence
  Description of Artificial Sequence: Synthetic peptide
  MOD_RES (2)..(2): oxidized methionine
  MOD_RES (8)..(8): phosphoserine
TMFLRETSLFFRKNLLRLTG

SEQ ID NO: 2539 - protein, 20 aa, Artificial Sequence
  Description of Artificial Sequence: Synthetic peptide
  MOD_RES (7)..(7): phosphothreonine
TMFLRETSLFFRKNLLRLTG

SEQ ID NO: 2540 - protein, 20 aa, Artificial Sequence
  Description of Artificial Sequence: Synthetic peptide
  MOD_RES (8)..(8): phosphoserine
TMFLRETSLFFRKNLLRLTG

SEQ ID NO: 2541 - protein, 23 aa, Artificial Sequence
  Description of Artificial Sequence: Synthetic peptide
  MOD_RES (2)..(2): oxidized methionine
  MOD_RES (4)..(4): phosphoserine
TMLSPREKIFYYFFRKNLLRLTG

SEQ ID NO: 2542 - protein, 23 aa, Artificial Sequence
  Description of Artificial Sequence: Synthetic peptide
  MOD_RES (4)..(4): phosphoserine
TMLSPREKIFYYFFRKNLLRLTG

SEQ ID NO: 2543 - protein, 27 aa, Artificial Sequence
  Description of Artificial Sequence: Synthetic peptide
  MOD_RES (9)..(9): phosphoserine
TPAGSARGSPTRPNPPFFRKNLLRLTG

SEQ ID NO: 2544 - protein, 20 aa, Artificial Sequence
  Description of Artificial Sequence: Synthetic peptide
  MOD_RES (4)..(4): phosphothreonine
TPHTPKSLLFFRKNLLRLTG

SEQ ID NO: 2545 - protein, 25 aa, Artificial Sequence
  Description of Artificial Sequence: Synthetic peptide
  MOD_RES (4)..(4): phosphoserine
  MOD_RES (11)..(11): oxidized methionine
TPISPGRASGMTTLFFRKNLLRLTG

SEQ ID NO: 2546 - protein, 25 aa, Artificial Sequence
  Description of Artificial Sequence: Synthetic peptide
  MOD_RES (4)..(4): phosphoserine
TPISPGRASGMTTLFFRKNLLRLTG

SEQ ID NO: 2547 - protein, 23 aa, Artificial Sequence
  Description of Artificial Sequence: Synthetic peptide
  MOD_RES (1)..(1): phosphothreonine
TPPSSEKLVSVMFFRKNLLRLTG

SEQ ID NO: 2548 - protein, 21 aa, Artificial Sequence
  Description of Artificial Sequence: Synthetic peptide
  MOD_RES (5)..(5): phosphoserine
TPQPSKDTLLFFRKNLLRLTG

SEQ ID NO: 2549 - protein, 20 aa, Artificial Sequence
  Description of Artificial Sequence: Synthetic peptide
  MOD_RES (3)..(3): phosphoserine
TPSPARPALFFRKNLLRLTG

SEQ ID NO: 2550 - protein, 19 aa, Artificial Sequence
  Description of Artificial Sequence: Synthetic peptide
  MOD_RES (4)..(4): phosphoserine
TPVSPVKFFFRKNLLRLTG

SEQ ID NO: 2551 - protein, 20 aa, Artificial Sequence
  Description of Artificial Sequence: Synthetic peptide
  MOD_RES (6)..(6): phosphoserine
TQRKFSLQFFFRKNLLRLTG

SEQ ID NO: 2552 - protein, 20 aa, Artificial Sequence
  Description of Artificial Sequence: Synthetic peptide
  MOD_RES (4)..(4): phosphoserine
TRDSLLIHLFFRKNLLRLTG

SEQ ID NO: 2553 - protein, 20 aa, Artificial Sequence
  Description of Artificial Sequence: Synthetic peptide
  MOD_RES (4)..(4): phosphothreonine
TSETPQPPRFFRKNLLRLTG

SEQ ID NO: 2554 - protein, 20 aa, Artificial Sequence
  Description of Artificial Sequence: Synthetic peptide
  MOD_RES (4)..(4): phosphoserine
TSISPALARFFRKNLLRLTG

SEQ ID NO: 2555 - protein, 23 aa, Artificial Sequence
  Description of Artificial Sequence: Synthetic peptide
  MOD_RES (5)..(5): phosphoserine
TSVGSPSNTIGRFFRKNLLRLTG

SEQ ID NO: 2556 - protein, 23 aa, Artificial Sequence
  Description of Artificial Sequence: Synthetic peptide
  MOD_RES (11)..(11): phosphoserine
TSYNSISSVVSRFFRKNLLRLTG

SEQ ID NO: 2557 - protein, 24 aa, Artificial Sequence
  Description of Artificial Sequence: Synthetic peptide
  MOD_RES (9)..(9): phosphoserine
TTEVIRKGSITEYFFRKNLLRLTG

SEQ ID NO: 2558 - protein, 20 aa, Artificial Sequence
  Description of Artificial Sequence: Synthetic peptide
  MOD_RES (1)..(1): phosphothreonine
TTGSPTEFLFFRKNLLRLTG

SEQ ID NO: 2559 - protein, 20 aa, Artificial Sequence
  Description of Artificial Sequence: Synthetic peptide
  MOD_RES (2)..(2): phosphothreonine
TTGSPTEFLFFRKNLLRLTG

SEQ ID NO: 2560 - protein, 20 aa, Artificial Sequence
  Description of Artificial Sequence: Synthetic peptide
  MOD_RES (4)..(4): phosphoserine
TTGSPTEFLFFRKNLLRLTG

SEQ ID NO: 2561 - protein, 21 aa, Artificial Sequence
  Description of Artificial Sequence: Synthetic peptide
  MOD_RES (4)..(4): phosphoserine
TVFSPDGHLFFFRKNLLRLTG

SEQ ID NO: 2562 - protein, 21 aa, Artificial Sequence
  Description of Artificial Sequence: Synthetic peptide
  MOD_RES (6)..(6): phosphothreonine
TVFSPTLPAAFFRKNLLRLTG

SEQ ID NO: 2563 - protein, 22 aa, Artificial Sequence
  Description of Artificial Sequence: Synthetic peptide
  MOD_RES (4)..(4): phosphoserine
TVFSPTLPAARFFRKNLLRLTG

SEQ ID NO: 2564 - protein, 20 aa, Artificial Sequence
  Description of Artificial Sequence: Synthetic peptide
  MOD_RES (4)..(4): phosphothreonine
TVFTPVEEKFFRKNLLRLTG

SEQ ID NO: 2565 - protein, 20 aa, Artificial Sequence
  Description of Artificial Sequence: Synthetic peptide
  MOD_RES (8)..(8): phosphoserine
TVKQKYLSFFFRKNLLRLTG

SEQ ID NO: 2566 - protein, 20 aa, Artificial Sequence
  Description of Artificial Sequence: Synthetic peptide
  MOD_RES (4)..(4): phosphoserine
TVNSPAIYKFFRKNLLRLTG

SEQ ID NO: 2567 - protein, 21 aa, Artificial Sequence
  Description of Artificial Sequence: Synthetic peptide
  MOD_RES (4)..(4): phosphoserine
TVNSPAIYKFFFRKNLLRLTG

SEQ ID NO: 2568 - protein, 22 aa, Artificial Sequence
  Description of Artificial Sequence: Synthetic peptide
  MOD_RES (4)..(4): phosphothreonine
TVSTPPPFQGRFFRKNLLRLTG

SEQ ID NO: 2569 - protein, 20 aa, Artificial Sequence
  Description of Artificial Sequence: Synthetic peptide
  MOD_RES (3)..(3): phosphoserine
TVSTVGISIFFRKNLLRLTG

SEQ ID NO: 2570 - protein, 21 aa, Artificial Sequence
  Description of Artificial Sequence: Synthetic peptide
  MOD_RES (4)..(4): phosphoserine
TVVSPRALELFFRKNLLRLTG

SEQ ID NO: 2571 - protein, 23 aa, Artificial Sequence
  Description of Artificial Sequence: Synthetic peptide
  MOD_RES (5)..(5): phosphoserine
TVYSSEEAELLKFFRKNLLRLTG

SEQ ID NO: 2572 - protein, 21 aa, Artificial Sequence
  Description of Artificial Sequence: Synthetic peptide
  MOD_RES (9)..(9): phosphoserine
TYDDRAYSSFFFRKNLLRLTG

SEQ ID NO: 2573 - protein, 21 aa, Artificial Sequence
  Description of Artificial Sequence: Synthetic peptide
  MOD_RES (4)..(4): phosphoserine
TYVSSFYHAFFFRKNLLRLTG

SEQ ID NO: 2574 - protein, 22 aa, Artificial Sequence
  Description of Artificial Sequence: Synthetic peptide
  MOD_RES (6)..(6): phosphoserine
VAKRNSLKELWFFRKNLLRLTG

SEQ ID NO: 2575 - protein, 20 aa, Artificial Sequence
  Description of Artificial Sequence: Synthetic peptide
  MOD_RES (4)..(4): phosphoserine
VARSPLKEFFFRKNLLRLTG

SEQ ID NO: 2576 - protein, 20 aa, Artificial Sequence
  Description of Artificial Sequence: Synthetic peptide
  MOD_RES (4)..(4): phosphoserine
VEHSPFSSFFFRKNLLRLTG

SEQ ID NO: 2577 - protein, 20 aa, Artificial Sequence
  Description of Artificial Sequence: Synthetic peptide
  MOD_RES (4)..(4): phosphoserine
  MOD_RES (9)..(9): oxidized tryptophan
VELSPARSWFFRKNLLRLTG

SEQ ID NO: 2578 - protein, 20 aa, Artificial Sequence
  Description of Artificial Sequence: Synthetic peptide
  MOD_RES (4)..(4): phosphoserine
VELSPARSWFFRKNLLRLTG

SEQ ID NO: 2579 - protein, 23 aa, Artificial Sequence
  Description of Artificial Sequence: Synthetic peptide
  MOD_RES (4)..(4): phosphoserine
VELSPLKGSVSWFFRKNLLRLTG

SEQ ID NO: 2580 - protein, 21 aa, Artificial Sequence
  Description of Artificial Sequence: Synthetic peptide
  MOD_RES (4)..(4): phosphoserine
VETSFRKLSFFFRKNLLRLTG

SEQ ID NO: 2581 - protein, 21 aa, Artificial Sequence
  Description of Artificial Sequence: Synthetic peptide
  MOD_RES (9)..(9): phosphoserine
VETSFRKLSFFFRKNLLRLTG

SEQ ID NO: 2582 - protein, 20 aa, Artificial Sequence
  Description of Artificial Sequence: Synthetic peptide
  MOD_RES (4)..(4): phosphoserine
VIDSQELSKFFRKNLLRLTG

SEQ ID NO: 2583 - protein, 20 aa, Artificial Sequence
  Description of Artificial Sequence: Synthetic peptide
  MOD_RES (4)..(4): phosphoserine
VIKSPSWQRFFRKNLLRLTG

SEQ ID NO: 2584 - protein, 20 aa, Artificial Sequence
  Description of Artificial Sequence: Synthetic peptide
  MOD_RES (3)..(3): oxidized methionine
  MOD_RES (4)..(4): phosphoserine
VIMSIRTKLFFRKNLLRLTG

SEQ ID NO: 2585 - protein, 20 aa, Artificial Sequence
  Description of Artificial Sequence: Synthetic peptide
  MOD_RES (4)..(4): phosphoserine
VIMSIRTKLFFRKNLLRLTG

SEQ ID NO: 2586 - protein, 21 aa, Artificial Sequence
  Description of Artificial Sequence: Synthetic peptide
  MOD_RES (4)..(4): phosphoserine
VLASPLKTGRFFRKNLLRLTG

SEQ ID NO: 2587 - protein, 20 aa, Artificial Sequence
  Description of Artificial Sequence: Synthetic peptide
  MOD_RES (5)..(5): phosphoserine
  MOD_RES (9)..(9): oxidized methionine
VLFSSPPQMFFRKNLLRLTG

SEQ ID NO: 2588 - protein, 22 aa, Artificial Sequence
  Description of Artificial Sequence: Synthetic peptide
  MOD_RES (4)..(4): phosphoserine
VLGSQEALHPVFFRKNLLRLTG

SEQ ID NO: 2589 - protein, 20 aa, Artificial Sequence
  Description of Artificial Sequence: Synthetic peptide
  MOD_RES (8)..(8): phosphoserine
VLPSQVYSLFFRKNLLRLTG

SEQ ID NO: 2590 - protein, 19 aa, Artificial Sequence
  Description of Artificial Sequence: Synthetic peptide
  MOD_RES (2)..(2): oxidized methionine
  MOD_RES (4)..(4): phosphoserine
VMDSPVHLFFRKNLLRLTG

SEQ ID NO: 2591 - protein, 21 aa, Artificial Sequence
  Description of Artificial Sequence: Synthetic peptide
  MOD_RES (2)..(2): oxidized methionine
  MOD_RES (5)..(5): phosphothreonine
VMFRTPLASVFFRKNLLRLTG

SEQ ID NO: 2592 - protein, 21 aa, Artificial Sequence
  Description of Artificial Sequence: Synthetic peptide
  MOD_RES (7)..(7): phosphoserine
VPFKRLSVVFFFRKNLLRLTG

SEQ ID NO: 2593 - protein, 23 aa, Artificial Sequence
  Description of Artificial Sequence: Synthetic peptide
  MOD_RES (8)..(8): phosphoserine
VPKGPIHSPVELFFRKNLLRLTG

SEQ ID NO: 2594 - protein, 20 aa, Artificial Sequence
  Description of Artificial Sequence: Synthetic peptide
  MOD_RES (8)..(8): phosphoserine
VPKKPPPSPFFRKNLLRLTG

SEQ ID NO: 2595 - protein, 20 aa, Artificial Sequence
  Description of Artificial Sequence: Synthetic peptide
  MOD_RES (8)..(8): phosphoserine
VPNEEDPSLFFRKNLLRLTG

SEQ ID NO: 2596 - protein, 22 aa, Artificial Sequence
  Description of Artificial Sequence: Synthetic peptide
  MOD_RES (4)..(4): phosphoserine
VPRSPFKVKVLFFRKNLLRLTG

SEQ ID NO: 2597 - protein, 20 aa, Artificial Sequence
  Description of Artificial Sequence: Synthetic peptide
  MOD_RES (4)..(4): phosphoserine
VPRSPVIKIFFRKNLLRLTG

SEQ ID NO: 2598 - protein, 20 aa, Artificial Sequence
  Description of Artificial Sequence: Synthetic peptide
  MOD_RES (4)..(4): phosphothreonine
VPRTPVGKFFFRKNLLRLTG

SEQ ID NO: 2599 - protein, 20 aa, Artificial Sequence
  Description of Artificial Sequence: Synthetic peptide
  MOD_RES (4)..(4): phosphoserine
VPSSPLRKAFFRKNLLRLTG

SEQ ID NO: 2600 - protein, 21 aa, Artificial Sequence
  Description of Artificial Sequence: Synthetic peptide
  MOD_RES (4)..(4): phosphoserine
VPTSPKGRLLFFRKNLLRLTG

SEQ ID NO: 2601 - protein, 20 aa, Artificial Sequence
  Description of Artificial Sequence: Synthetic peptide
  MOD_RES (4)..(4): phosphoserine
VRKSRAWVLFFRKNLLRLTG

SEQ ID NO: 2602 - protein, 20 aa, Artificial Sequence
  Description of Artificial Sequence: Synthetic peptide
  MOD_RES (8)..(8): phosphoserine
VRTPSVQSLFFRKNLLRLTG

SEQ ID NO: 2603 - protein, 21 aa, Artificial Sequence
  Description of Artificial Sequence: Synthetic peptide
  MOD_RES (4)..(4): phosphoserine
VSFSPTDHSLFFRKNLLRLTG

SEQ ID NO: 2604 - protein, 20 aa, Artificial Sequence
  Description of Artificial Sequence: Synthetic peptide
  MOD_RES (4)..(4): phosphoserine
VSSSPRELLFFRKNLLRLTG

SEQ ID NO: 2605 - protein, 21 aa, Artificial Sequence
  Description of Artificial Sequence: Synthetic peptide
  MOD_RES (4)..(4): phosphoserine
VVSSPKLAPKFFRKNLLRLTG

SEQ ID NO: 2606 - protein, 23 aa, Artificial Sequence
  Description of Artificial Sequence: Synthetic peptide
  MOD_RES (5)..(5): oxidized methionine
  MOD_RES (6)..(6): phosphoserine
VYIPMSPGAHHFFFRKNLLRLTG

SEQ ID NO: 2607 - protein, 23 aa, Artificial Sequence
  Description of Artificial Sequence: Synthetic peptide
  MOD_RES (6)..(6): phosphoserine
VYIPMSPGAHHFFFRKNLLRLTG

SEQ ID NO: 2608 - protein, 20 aa, Artificial Sequence
  Description of Artificial Sequence: Synthetic peptide
  MOD_RES (7)..(7): phosphothreonine
VYLPTHTSLFFRKNLLRLTG

SEQ ID NO: 2609 - protein, 20 aa, Artificial Sequence
  Description of Artificial Sequence: Synthetic peptide
  MOD_RES (8)..(8): phosphoserine
VYLPTHTSLFFRKNLLRLTG

SEQ ID NO: 2610 - protein, 21 aa, Artificial Sequence
  Description of Artificial Sequence: Synthetic peptide
  MOD_RES (7)..(7): phosphothreonine
VYLPTHTSLLFFRKNLLRLTG

SEQ ID NO: 2611 - protein, 21 aa, Artificial Sequence
  Description of Artificial Sequence: Synthetic peptide
  MOD_RES (8)..(8): phosphoserine
VYLPTHTSLLFFRKNLLRLTG

SEQ ID NO: 2612 - protein, 20 aa, Artificial Sequence
  Description of Artificial Sequence: Synthetic peptide
  MOD_RES (4)..(4): phosphoserine
VYTSVQAQYFFRKNLLRLTG

SEQ ID NO: 2613 - protein, 22 aa, Artificial Sequence
  Description of Artificial Sequence: Synthetic peptide
  MOD_RES (7)..(7): phosphothreonine
WEDRPSTPTILFFRKNLLRLTG

SEQ ID NO: 2614 - protein, 20 aa, Artificial Sequence
  Description of Artificial Sequence: Synthetic peptide
  MOD_RES (8)..(8): phosphoserine
WEFGKRDSLFFRKNLLRLTG

SEQ ID NO: 2615 - protein, 21 aa, Artificial Sequence
  Description of Artificial Sequence: Synthetic peptide
  MOD_RES (4)..(4): phosphoserine
WPRSPGRAFLFFRKNLLRLTG

SEQ ID NO: 2616 - protein, 21 aa, Artificial Sequence
  Description of Artificial Sequence: Synthetic peptide
  MOD_RES (5)..(5): phosphoserine
WVIGSPEILRFFRKNLLRLTG

SEQ ID NO: 2617 - protein, 20 aa, Artificial Sequence
  Description of Artificial Sequence: Synthetic peptide
  MOD_RES (4)..(4): phosphoserine
YAFSPKIGRFFRKNLLRLTG

SEQ ID NO: 2618 - protein, 20 aa, Artificial Sequence
  Description of Artificial Sequence: Synthetic peptide
  MOD_RES (1)..(1): phosphotyrosine
YEKIHLDFLFFRKNLLRLTG

SEQ ID NO: 2619 - protein, 21 aa, Artificial Sequence
  Description of Artificial Sequence: Synthetic peptide
  MOD_RES (7)..(7): phosphoserine
YEVEPYSPGLFFRKNLLRLTG

SEQ ID NO: 2620 - protein, 20 aa, Artificial Sequence
  Description of Artificial Sequence: Synthetic peptide
  MOD_RES (4)..(4): phosphoserine
YHLSPRAFLFFRKNLLRLTG

SEQ ID NO: 2621 - protein, 21 aa, Artificial Sequence
  Description of Artificial Sequence: Synthetic peptide
  MOD_RES (6)..(6): phosphoserine
YILDSSPEKLFFRKNLLRLTG

SEQ ID NO: 2622 - protein, 22 aa, Artificial Sequence
  Description of Artificial Sequence: Synthetic peptide
  MOD_RES (4)..(4): phosphoserine
YLRSVGDGETVFFRKNLLRLTG

SEQ ID NO: 2623 - protein, 22 aa, Artificial Sequence
  Description of Artificial Sequence: Synthetic peptide
  MOD_RES (4)..(4): phosphoserine
YLVSPITGEKIFFRKNLLRLTG

SEQ ID NO: 2624 - protein, 20 aa, Artificial Sequence
  Description of Artificial Sequence: Synthetic peptide
  MOD_RES (6)..(6): phosphoserine
YPDPHSPFAFFRKNLLRLTG

SEQ ID NO: 2625 - protein, 23 aa, Artificial Sequence
  Description of Artificial Sequence: Synthetic peptide
  MOD_RES (6)..(6): phosphoserine
YPFLDSPNKYSLFFRKNLLRLTG

SEQ ID NO: 2626 - protein, 20 aa, Artificial Sequence
  Description of Artificial Sequence: Synthetic peptide
  MOD_RES (8)..(8): phosphoserine
YPSFRRSSLFFRKNLLRLTG

SEQ ID NO: 2627 - protein, 20 aa, Artificial Sequence
  Description of Artificial Sequence: Synthetic peptide
  MOD_RES (3)..(3): phosphothreonine
YPTPYPDELFFRKNLLRLTG

SEQ ID NO: 2628 - protein, 23 aa, Artificial Sequence
  Description of Artificial Sequence: Synthetic peptide
  MOD_RES (4)..(4): phosphoserine
YQLSPTKLPSINFFRKNLLRLTG

SEQ ID NO: 2629 - protein, 21 aa, Artificial Sequence
  Description of Artificial Sequence: Synthetic peptide
  MOD_RES (8)..(8): phosphoserine
YQRPFSPSAYFFRKNLLRLTG

SEQ ID NO: 2630 - protein, 21 aa, Artificial Sequence
  Description of Artificial Sequence: Synthetic peptide
  MOD_RES (4)..(4): phosphoserine
YQYSDQGIDYFFRKNLLRLTG

SEQ ID NO: 2631 - protein, 21 aa, Artificial Sequence
  Description of Artificial Sequence: Synthetic peptide
  MOD_RES (4)..(4): phosphoserine
YRLSPEPTPLFFRKNLLRLTG

SEQ ID NO: 2632 - protein, 20 aa, Artificial Sequence
  Description of Artificial Sequence: Synthetic peptide
  MOD_RES (4)..(4): phosphoserine
YRPSYSYDYFFRKNLLRLTG

SEQ ID NO: 2633 - protein, 23 aa, Artificial Sequence
  Description of Artificial Sequence: Synthetic peptide
  MOD_RES (4)..(4): phosphoserine
YRPSYSYDYEFDFFRKNLLRLTG

SEQ ID NO: 2634 - protein, 21 aa, Artificial Sequence
  Description of Artificial Sequence: Synthetic peptide
  MOD_RES (9)..(9): phosphoserine
YRYDGQHFSLFFRKNLLRLTG

SEQ ID NO: 2635 - protein, 20 aa, Artificial Sequence
  Description of Artificial Sequence: Synthetic peptide
  MOD_RES (4)..(4): phosphoserine
YRYSLEKALFFRKNLLRLTG

SEQ ID NO: 2636 - protein, 24 aa, Artificial Sequence
  Description of Artificial Sequence: Synthetic peptide
  MOD_RES (5)..(5): phosphoserine
  MOD_RES (11)..(11): oxidized methionine
YSLDSPGPEKMALFFRKNLLRLTG

SEQ ID NO: 2637 - protein, 24 aa, Artificial Sequence
  Description of Artificial Sequence: Synthetic peptide
  MOD_RES (5)..(5): phosphoserine
YSLDSPGPEKMALFFRKNLLRLTG

SEQ ID NO: 2638 - protein, 22 aa, Artificial Sequence
  Description of Artificial Sequence: Synthetic peptide
  MOD_RES (4)..(4): phosphoserine
YSLSPSKSYKYFFRKNLLRLTG

SEQ ID NO: 2639 - protein, 20 aa, Artificial Sequence
  Description of Artificial Sequence: Synthetic peptide
  MOD_RES (3)..(3): oxidized methionine
  MOD_RES (4)..(4): phosphoserine
YSMSPGAMRFFRKNLLRLTG

SEQ ID NO: 2640 - protein, 20 aa, Artificial Sequence
  Description of Artificial Sequence: Synthetic peptide
  MOD_RES (4)..(4): phosphoserine
  MOD_RES (8)..(8): oxidized methionine
YSMSPGAMRFFRKNLLRLTG

SEQ ID NO: 2641 - protein, 20 aa, Artificial Sequence
  Description of Artificial Sequence: Synthetic peptide
  MOD_RES (4)..(4): phosphoserine
YSMSPGAMRFFRKNLLRLTG

SEQ ID NO: 2642 - protein, 20 aa, Artificial Sequence
  Description of Artificial Sequence: Synthetic peptide
  MOD_RES (8)..(8): phosphoserine
YVKLTPVSLFFRKNLLRLTG

SEQ ID NO: 2643 - protein, 20 aa, Artificial Sequence
  Description of Artificial Sequence: Synthetic peptide
  MOD_RES (4)..(4): phosphoserine
YVSSPDPQLFFRKNLLRLTG

SEQ ID NO: 2644 - protein, 21 aa, Artificial Sequence
  Description of Artificial Sequence: Synthetic peptide
  MOD_RES (4)..(4): phosphoserine
YYFSPSGKKFFFRKNLLRLTG

SEQ ID NO: 2645 - protein, 20 aa, Artificial Sequence
  Description of Artificial Sequence: Synthetic peptide
  MOD_RES (1)..(1): phosphotyrosine
YYISPRITFFFRKNLLRLTG

SEQ ID NO: 2646 - protein, 22 aa, Artificial Sequence
  Description of Artificial Sequence: Synthetic peptide
  MOD_RES (7)..(7): phosphoserine
AELGRLSPRAYFFRKNWLRLTW

SEQ ID NO: 2647 - protein, 20 aa, Artificial Sequence
  Description of Artificial Sequence: Synthetic peptide
  MOD_RES (5)..(5): oxidized methionine
  MOD_RES (6)..(6): phosphoserine
AESIMSFHIFFRKNWLRLTW

SEQ ID NO: 2648 - protein, 20 aa, Artificial Sequence
  Description of Artificial Sequence: Synthetic peptide
  MOD_RES (6)..(6): phosphoserine
AESIMSFHIFFRKNWLRLTW

SEQ ID NO: 2649 - protein, 22 aa, Artificial Sequence
  Description of Artificial Sequence: Synthetic peptide
  MOD_RES (3)..(3): phosphoserine
AESLKSLSSELFFRKNWLRLTW

SEQ ID NO: 2650 - protein, 20 aa, Artificial Sequence
  Description of Artificial Sequence: Synthetic peptide
  MOD_RES (3)..(3): phosphothreonine
AETPDIKLFFFRKNWLRLTW

SEQ ID NO: 2651 - protein, 20 aa, Artificial Sequence
  Description of Artificial Sequence: Synthetic peptide
  MOD_RES (4)..(4): phosphoserine
AGFSFVNPKFFRKNWLRLTW

SEQ ID NO: 2652 - protein, 24 aa, Artificial Sequence
  Description of Artificial Sequence: Synthetic peptide
  MOD_RES (7)..(7): oxidized methionine
  MOD_RES (12)..(12): phosphoserine
AHDPSGMFRSQSFFFRKNWLRLTW

SEQ ID NO: 2653 - protein, 22 aa, Artificial Sequence
  Description of Artificial Sequence: Synthetic peptide
  MOD_RES (7)..(7): phosphoserine
ALDSGASLLHLFFRKNWLRLTW

SEQ ID NO: 2654 - protein, 22 aa, Artificial Sequence
  Description of Artificial Sequence: Synthetic peptide
  MOD_RES (3)..(3): oxidized methionine
  MOD_RES (5)..(5): phosphoserine
ALMGSPQLVAAFFRKNWLRLTW

SEQ ID NO: 2655 - protein, 21 aa, Artificial Sequence
  Description of Artificial Sequence: Synthetic peptide
  MOD_RES (9)..(9): phosphoserine
ALPPGSYASLFFRKNWLRLTW

SEQ ID NO: 2656 - protein, 23 aa, Artificial Sequence
  Description of Artificial Sequence: Synthetic peptide
  MOD_RES (8)..(8): phosphoserine
ALPTPALSPSLMFFRKNWLRLTW

SEQ ID NO: 2657 - protein, 20 aa, Artificial Sequence
  Description of Artificial Sequence: Synthetic peptide
  MOD_RES (4)..(4): phosphoserine
ALSSSFLVLFFRKNWLRLTW

SEQ ID NO: 2658 - protein, 20 aa, Artificial Sequence
  Description of Artificial Sequence: Synthetic peptide
  MOD_RES (5)..(5): phosphoserine
ALSSSFLVLFFRKNWLRLTW

SEQ ID NO: 2659 - protein, 20 aa, Artificial Sequence
  Description of Artificial Sequence: Synthetic peptide
  MOD_RES (4)..(4): phosphothreonine
ALSTPVVEKFFRKNWLRLTW

SEQ ID NO: 2660 - protein, 20 aa, Artificial Sequence
  Description of Artificial Sequence: Synthetic peptide
  MOD_RES (6)..(6): phosphotyrosine
ALVDGYFRLFFRKNWLRLTW

SEQ ID NO: 2661 - protein, 20 aa, Artificial Sequence
  Description of Artificial Sequence: Synthetic peptide
  MOD_RES (3)..(3): oxidized tryptophan
  MOD_RES (4)..(4): phosphoserine
ALWSPGLAKFFRKNWLRLTW

SEQ ID NO: 2662 - protein, 24 aa, Artificial Sequence
  Description of Artificial Sequence: Synthetic peptide
  MOD_RES (2)..(2): oxidized methionine
  MOD_RES (7)..(7): phosphoserine
AMLGSKSPDPYRLFFRKNWLRLTW

SEQ ID NO: 2663 - protein, 20 aa, Artificial Sequence
  Description of Artificial Sequence: Synthetic peptide
  MOD_RES (4)..(4): phosphoserine
APASPFRQLFFRKNWLRLTW

SEQ ID NO: 2664 - protein, 20 aa, Artificial Sequence
  Description of Artificial Sequence: Synthetic peptide
  MOD_RES (4)..(4): phosphoserine
APASPLRPLFFRKNWLRLTW

SEQ ID NO: 2665 - protein, 22 aa, Artificial Sequence
  Description of Artificial Sequence: Synthetic peptide
  MOD_RES (4)..(4): phosphoserine
APASPNHAGVLFFRKNWLRLTW

SEQ ID NO: 2666 - protein, 21 aa, Artificial Sequence
  Description of Artificial Sequence: Synthetic peptide
  MOD_RES (6)..(6): phosphothreonine
APFHLTPTLYFFRKNWLRLTW

SEQ ID NO: 2667 - protein, 21 aa, Artificial Sequence
  Description of Artificial Sequence: Synthetic peptide
  MOD_RES (4)..(4): phosphoserine
APKSPSSEWLFFRKNWLRLTW

SEQ ID NO: 2668 - protein, 21 aa, Artificial Sequence
  Description of Artificial Sequence: Synthetic peptide
  MOD_RES (4)..(4): phosphothreonine
APRTPPGVTFFFRKNWLRLTW

SEQ ID NO: 2669 - protein, 20 aa, Artificial Sequence
  Description of Artificial Sequence: Synthetic peptide
  MOD_RES (3)..(3): phosphoserine
APSSPDVKLFFRKNWLRLTW

SEQ ID NO: 2670 - protein, 20 aa, Artificial Sequence
  Description of Artificial Sequence: Synthetic peptide
  MOD_RES (4)..(4): phosphoserine
APSSPDVKLFFRKNWLRLTW

SEQ ID NO: 2671 - protein, 20 aa, Artificial Sequence
  Description of Artificial Sequence: Synthetic peptide
  MOD_RES (4)..(4): phosphoserine
APTSPLGHLFFRKNWLRLTW

SEQ ID NO: 2672 - protein, 20 aa, Artificial Sequence
  Description of Artificial Sequence: Synthetic peptide
  MOD_RES (4)..(4): phosphoserine
APVSPRPGLFFRKNWLRLTW

SEQ ID NO: 2673 - protein, 20 aa, Artificial Sequence
  Description of Artificial Sequence: Synthetic peptide
  MOD_RES (4)..(4): phosphoserine
  MOD_RES (9)..(9): oxidized methionine
ARFSGFYSMFFRKNWLRLTW

SEQ ID NO: 2674 - protein, 20 aa, Artificial Sequence
  Description of Artificial Sequence: Synthetic peptide
  MOD_RES (4)..(4): phosphoserine
ARFSGFYSMFFRKNWLRLTW

SEQ ID NO: 2675 - protein, 20 aa, Artificial Sequence
  Description of Artificial Sequence: Synthetic peptide
  MOD_RES (4)..(4): phosphoserine
ARFSPKVSLFFRKNWLRLTW

SEQ ID NO: 2676 - protein, 20 aa, Artificial Sequence
  Description of Artificial Sequence: Synthetic peptide
  MOD_RES (5)..(5): phosphoserine
ARGISPIVFFFRKNWLRLTW

SEQ ID NO: 2677 - protein, 21 aa, Artificial Sequence
  Description of Artificial Sequence: Synthetic peptide
  MOD_RES (4)..(4): phosphoserine
ARYSGSYNDYFFRKNWLRLTW

SEQ ID NO: 2678 - protein, 20 aa, Artificial Sequence
  Description of Artificial Sequence: Synthetic peptide
  MOD_RES (8)..(8): phosphoserine
ASFKAELSYFFRKNWLRLTW

SEQ ID NO: 2679 - protein, 21 aa, Artificial Sequence
  Description of Artificial Sequence: Synthetic peptide
  MOD_RES (4)..(4): phosphothreonine
ASFTPTSILKFFRKNWLRLTW

SEQ ID NO: 2680 - protein, 22 aa, Artificial Sequence
  Description of Artificial Sequence: Synthetic peptide
  MOD_RES (4)..(4): phosphothreonine
ASFTPTSILKRFFRKNWLRLTW

SEQ ID NO: 2681 - protein, 20 aa, Artificial Sequence
  Description of Artificial Sequence: Synthetic peptide
  MOD_RES (4)..(4): phosphoserine
ASLSPSVSKFFRKNWLRLTW

SEQ ID NO: 2682 - protein, 21 aa, Artificial Sequence
  Description of Artificial Sequence: Synthetic peptide
  MOD_RES (4)..(4): phosphoserine
ATISPPLQPKFFRKNWLRLTW

SEQ ID NO: 2683 - protein, 23 aa, Artificial Sequence
  Description of Artificial Sequence: Synthetic peptide
  MOD_RES (8)..(8): phosphoserine
AVILPPLSPYFKFFRKNWLRLTW

SEQ ID NO: 2684 - protein, 19 aa, Artificial Sequence
  Description of Artificial Sequence: Synthetic peptide
  MOD_RES (5)..(5): phosphotyrosine
AVLEYLKIFFRKNWLRLTW

SEQ ID NO: 2685 - protein, 22 aa, Artificial Sequence
  Description of Artificial Sequence: Synthetic peptide
  MOD_RES (6)..(6): phosphoserine
AVNQFSPSLARFFRKNWLRLTW

SEQ ID NO: 2686 - protein, 22 aa, Artificial Sequence
  Description of Artificial Sequence: Synthetic peptide
  MOD_RES (6)..(6): phosphoserine
AVRNFSPTDYYFFRKNWLRLTW

SEQ ID NO: 2687 - protein, 22 aa, Artificial Sequence
  Description of Artificial Sequence: Synthetic peptide
  MOD_RES (8)..(8): phosphothreonine
AVRNFSPTDYYFFRKNWLRLTW

SEQ ID NO: 2688 - protein, 23 aa, Artificial Sequence
  Description of Artificial Sequence: Synthetic peptide
  MOD_RES (6)..(6): phosphoserine
AWRRLSRDSGGYFFRKNWLRLTW

SEQ ID NO: 2689 - protein, 23 aa, Artificial Sequence
  Description of Artificial Sequence: Synthetic peptide
  MOD_RES (6)..(6): phosphothreonine
AYGGLTSPGLSYFFRKNWLRLTW

SEQ ID NO: 2690 - protein, 23 aa, Artificial Sequence
  Description of Artificial Sequence: Synthetic peptide
  MOD_RES (7)..(7): phosphoserine
AYGGLTSPGLSYFFRKNWLRLTW

SEQ ID NO: 2691 - protein, 20 aa, Artificial Sequence
  Description of Artificial Sequence: Synthetic peptide
  MOD_RES (4)..(4): phosphoserine
AYSSYVHQYFFRKNWLRLTW

SEQ ID NO: 2692 - protein, 19 aa, Artificial Sequence
  Description of Artificial Sequence: Synthetic peptide
  MOD_RES (2)..(2): phosphothreonine
CTFGSRQIFFRKNWLRLTW

SEQ ID NO: 2693 - protein, 20 aa, Artificial Sequence
  Description of Artificial Sequence: Synthetic peptide
  MOD_RES (4)..(4): phosphoserine
DFASPFHERFFRKNWLRLTW

SEQ ID NO: 2694 - protein, 21 aa, Artificial Sequence
  Description of Artificial Sequence: Synthetic peptide
  MOD_RES (4)..(4): phosphoserine
DFHSPIVLGRFFRKNWLRLTW

SEQ ID NO: 2695 - protein, 21 aa, Artificial Sequence
  Description of Artificial Sequence: Synthetic peptide
  MOD_RES (4)..(4): phosphoserine
DIASPTFRRLFFRKNWLRLTW

SEQ ID NO: 2696 - protein, 24 aa, Artificial Sequence
  Description of Artificial Sequence: Synthetic peptide
  MOD_RES (7)..(7): phosphoserine
DIIRQPSEEEIIKFFRKNWLRLTW

SEQ ID NO: 2697 - protein, 20 aa, Artificial Sequence
  Description of Artificial Sequence: Synthetic peptide
  MOD_RES (4)..(4): phosphoserine
DIKSVFEAFFFRKNWLRLTW

SEQ ID NO: 2698 - protein, 20 aa, Artificial Sequence
  Description of Artificial Sequence: Synthetic peptide
  MOD_RES (4)..(4): phosphoserine
DILSPRLIRFFRKNWLRLTW

SEQ ID NO: 2699 - protein, 22 aa, Artificial Sequence
  Description of Artificial Sequence: Synthetic peptide
  MOD_RES (6)..(6): phosphoserine
DIRRFSLTTLRFFRKNWLRLTW

SEQ ID NO: 2700 - protein, 20 aa, Artificial Sequence
  Description of Artificial Sequence: Synthetic peptide
  MOD_RES (3)..(3): phosphoserine
DISPPIFRRFFRKNWLRLTW

SEQ ID NO: 2701 - protein, 20 aa, Artificial Sequence
  Description of Artificial Sequence: Synthetic peptide
  MOD_RES (3)..(3): phosphothreonine
DLTLKKEKFFFRKNWLRLTW

SEQ ID NO: 2702 - protein, 23 aa, Artificial Sequence
  Description of Artificial Sequence: Synthetic peptide
  MOD_RES (6)..(6): phosphothreonine
DMLGLTKPAMPMFFRKNWLRLTW

SEQ ID NO: 2703 - protein, 22 aa, Artificial Sequence
  Description of Artificial Sequence: Synthetic peptide
  MOD_RES (4)..(4): phosphoserine
DNFSPDLRVLRFFRKNWLRLTW

SEQ ID NO: 2704 - protein, 20 aa, Artificial Sequence
  Description of Artificial Sequence: Synthetic peptide
  MOD_RES (8)..(8): phosphoserine
DPFGRPTSFFFRKNWLRLTW

SEQ ID NO: 2705 - protein, 20 aa, Artificial Sequence
  Description of Artificial Sequence: Synthetic peptide
  MOD_RES (8)..(8): phosphoserine
DPLIRWDSYFFRKNWLRLTW

SEQ ID NO: 2706 - protein, 20 aa, Artificial Sequence
  Description of Artificial Sequence: Synthetic peptide
  MOD_RES (8)..(8): phosphoserine
DPSLDLHSLFFRKNWLRLTW

SEQ ID NO: 2707 - protein, 22 aa, Artificial Sequence
  Description of Artificial Sequence: Synthetic peptide
  MOD_RES (5)..(5): oxidized methionine
  MOD_RES (7)..(7): phosphoserine
DSDPMLSPRFYFFRKNWLRLTW

SEQ ID NO: 2708 - protein, 22 aa, Artificial Sequence
  Description of Artificial Sequence: Synthetic peptide
  MOD_RES (7)..(7): phosphoserine
DSDPMLSPRFYFFRKNWLRLTW

SEQ ID NO: 2709 - protein, 24 aa, Artificial Sequence
  Description of Artificial Sequence: Synthetic peptide
  MOD_RES (5)..(5): oxidized methionine
  MOD_RES (7)..(7): phosphoserine
DSDPMLSPRFYAYFFRKNWLRLTW

SEQ ID NO: 2710 - protein, 24 aa, Artificial Sequence
  Description of Artificial Sequence: Synthetic peptide
  MOD_RES (7)..(7): phosphoserine
DSDPMLSPRFYAYFFRKNWLRLTW

SEQ ID NO: 2711 - protein, 26 aa, Artificial Sequence
  Description of Artificial Sequence: Synthetic peptide
  MOD_RES (2)..(2): phosphoserine
DSGEGDFLAEGGGVRFFRKNWLRLTW

SEQ ID NO: 2712 - protein, 20 aa, Artificial Sequence
  Description of Artificial Sequence: Synthetic peptide
  MOD_RES (4)..(4): phosphoserine
DSKSPLGFYFFRKNWLRLTW

SEQ ID NO: 2713 - protein, 21 aa, Artificial Sequence
  Description of Artificial Sequence: Synthetic peptide
  MOD_RES (4)..(4): phosphoserine
DTISLASERYFFRKNWLRLTW

SEQ ID NO: 2714 - protein, 20 aa, Artificial Sequence
  Description of Artificial Sequence: Synthetic peptide
  MOD_RES (4)..(4): phosphoserine
DTISPTLGFFFRKNWLRLTW

SEQ ID NO: 2715 - protein, 23 aa, Artificial Sequence
  Description of Artificial Sequence: Synthetic peptide
  MOD_RES (6)..(6): phosphoserine
DTQSGSLLFIGRFFRKNWLRLTW

SEQ ID NO: 2716 - protein, 22 aa, Artificial Sequence
  Description of Artificial Sequence: Synthetic peptide
  MOD_RES (3)..(3): phosphoserine
DTSSLPTVIMRFFRKNWLRLTW

SEQ ID NO: 2717 - protein, 22 aa, Artificial Sequence
  Description of Artificial Sequence: Synthetic peptide
  MOD_RES (4)..(4): phosphoserine
  MOD_RES (10)..(10): oxidized methionine
DTSSLPTVIMRFFRKNWLRLTW

SEQ ID NO: 2718 - protein, 22 aa, Artificial Sequence
  Description of Artificial Sequence: Synthetic peptide
  MOD_RES (4)..(4): phosphoserine
DTSSLPTVIMRFFRKNWLRLTW

SEQ ID NO: 2719 - protein, 21 aa, Artificial Sequence
  Description of Artificial Sequence: Synthetic peptide
  MOD_RES (4)..(4): phosphoserine
DTTSLRTLRIFFRKNWLRLTW

SEQ ID NO: 2720 - protein, 22 aa, Artificial Sequence
  Description of Artificial Sequence: Synthetic peptide
  MOD_RES (4)..(4): phosphoserine
DVASPDGLGRLFFRKNWLRLTW

SEQ ID NO: 2721 - protein, 19 aa, Artificial Sequence
  Description of Artificial Sequence: Synthetic peptide
  MOD_RES (4)..(4): phosphoserine
DVASPTLRFFRKNWLRLTW

SEQ ID NO: 2722 - protein, 20 aa, Artificial Sequence
  Description of Artificial Sequence: Synthetic peptide
  MOD_RES (4)..(4): phosphoserine
DVASPTLRRFFRKNWLRLTW

SEQ ID NO: 2723 - protein, 21 aa, Artificial Sequence
  Description of Artificial Sequence: Synthetic peptide
  MOD_RES (4)..(4): phosphoserine
DVASPTLRRLFFRKNWLRLTW

SEQ ID NO: 2724 - protein, 22 aa, Artificial Sequence
  Description of Artificial Sequence: Synthetic peptide
  MOD_RES (5)..(5): phosphoserine
DVIDSQELSKVFFRKNWLRLTW

SEQ ID NO: 2725 - protein, 21 aa, Artificial Sequence
  Description of Artificial Sequence: Synthetic peptide
  MOD_RES (6)..(6): phosphothreonine
DVYSGTPTKVFFRKNWLRLTW

SEQ ID NO: 2726 - protein, 20 aa, Artificial Sequence
  Description of Artificial Sequence: Synthetic peptide
  MOD_RES (8)..(8): phosphothreonine
DYSPYFKTIFFRKNWLRLTW

SEQ ID NO: 2727 - protein, 20 aa, Artificial Sequence
  Description of Artificial Sequence: Synthetic peptide
  MOD_RES (3)..(3): phosphoserine
EASSPVPYLFFRKNWLRLTW

SEQ ID NO: 2728 - protein, 20 aa, Artificial Sequence
  Description of Artificial Sequence: Synthetic peptide
  MOD_RES (4)..(4): phosphoserine
EASSPVPYLFFRKNWLRLTW

SEQ ID NO: 2729 - protein, 21 aa, Artificial Sequence
  Description of Artificial Sequence: Synthetic peptide
  MOD_RES (6)..(6): phosphothreonine
EEAPQTPVAFFFRKNWLRLTW

SEQ ID NO: 2730 - protein, 20 aa, Artificial Sequence
  Description of Artificial Sequence: Synthetic peptide
  MOD_RES (4)..(4): phosphothreonine
EEDTYEKVFFFRKNWLRLTW

SEQ ID NO: 2731 - protein, 22 aa, Artificial Sequence
  Description of Artificial Sequence: Synthetic peptide
  MOD_RES (4)..(4): phosphoserine
  MOD_RES (10)..(10): oxidized methionine
EEFSPRQAQMFFFRKNWLRLTW

SEQ ID NO: 2732 - protein, 22 aa, Artificial Sequence
  Description of Artificial Sequence: Synthetic peptide
  MOD_RES (4)..(4): phosphoserine
EEFSPRQAQMFFFRKNWLRLTW

SEQ ID NO: 2733 - protein, 22 aa, Artificial Sequence
  Description of Artificial Sequence: Synthetic peptide
  MOD_RES (4)..(4): phosphoserine
EEISPTKFPGLFFRKNWLRLTW

SEQ ID NO: 2734 - protein, 23 aa, Artificial Sequence
  Description of Artificial Sequence: Synthetic peptide
  MOD_RES (4)..(4): phosphoserine
EEISPTKFPGLYFFRKNWLRLTW

SEQ ID NO: 2735 - protein, 22 aa, Artificial Sequence
  Description of Artificial Sequence: Synthetic peptide
  MOD_RES (4)..(4): phosphoserine
EELSPLALGRFFFRKNWLRLTW

SEQ ID NO: 2736 - protein, 21 aa, Artificial Sequence
  Description of Artificial Sequence: Synthetic peptide
  MOD_RES (4)..(4): phosphoserine
EELSPSTVLYFFRKNWLRLTW

SEQ ID NO: 2737 - protein, 21 aa, Artificial Sequence
  Description of Artificial Sequence: Synthetic peptide
  MOD_RES (6)..(6): phosphoserine
EELSPSTVLYFFRKNWLRLTW

SEQ ID NO: 2738 - protein, 20 aa, Artificial Sequence
  Description of Artificial Sequence: Synthetic peptide
  MOD_RES (6)..(6): phosphothreonine
EELSPTAKFFFRKNWLRLTW

SEQ ID NO: 2739 - protein, 20 aa, Artificial Sequence
  Description of Artificial Sequence: Synthetic peptide
  MOD_RES (5)..(5): phosphothreonine
EGPETGYSLFFRKNWLRLTW

SEQ ID NO: 2740 - protein, 22 aa, Artificial Sequence
  Description of Artificial Sequence: Synthetic peptide
  MOD_RES (7)..(7): phosphoserine
EHERSISPLLFFFRKNWLRLTW

SEQ ID NO: 2741 - protein, 21 aa, Artificial Sequence
  Description of Artificial Sequence: Synthetic peptide
  MOD_RES (6)..(6): phosphoserine
EIVNFSPIARFFRKNWLRLTW

SEQ ID NO: 2742 - protein, 20 aa, Artificial Sequence
  Description of Artificial Sequence: Synthetic peptide
  MOD_RES (8)..(8): phosphoserine
ERLKIRGSLFFRKNWLRLTW

SEQ ID NO: 2743 - protein, 20 aa, Artificial Sequence
  Description of Artificial Sequence: Synthetic peptide
  MOD_RES (8)..(8): phosphoserine
ERVDSLVSLFFRKNWLRLTW

SEQ ID NO: 2744 - protein, 24 aa, Artificial Sequence
  Description of Artificial Sequence: Synthetic peptide
  MOD_RES (6)..(6): phosphotyrosine
ESFSDYPPLGRFAFFRKNWLRLTW

SEQ ID NO: 2745 - protein, 22 aa, Artificial Sequence
  Description of Artificial Sequence: Synthetic peptide
  MOD_RES (4)..(4): phosphoserine
  MOD_RES (9)..(9): oxidized methionine
ESLSPIGDMKVFFRKNWLRLTW

SEQ ID NO: 2746 - protein, 22 aa, Artificial Sequence
  Description of Artificial Sequence: Synthetic peptide
  MOD_RES (4)..(4): phosphoserine
ESLSPIGDMKVFFRKNWLRLTW

SEQ ID NO: 2747 - protein, 21 aa, Artificial Sequence
  Description of Artificial Sequence: Synthetic peptide
  MOD_RES (9)..(9): phosphoserine
ESVYKASLSLFFRKNWLRLTW

SEQ ID NO: 2748 - protein, 21 aa, Artificial Sequence
  Description of Artificial Sequence: Synthetic peptide
  MOD_RES (6)..(6): phosphoserine
ETRRPSYLEWFFRKNWLRLTW

SEQ ID NO: 2749 - protein, 22 aa, Artificial Sequence
  Description of Artificial Sequence: Synthetic peptide
  MOD_RES (7)..(7): phosphoserine
EVIRKGSITEYFFRKNWLRLTW

SEQ ID NO: 2750 - protein, 21 aa, Artificial Sequence
  Description of Artificial Sequence: Synthetic peptide
  MOD_RES (4)..(4): phosphoserine
EVISQHLVSYFFRKNWLRLTW

SEQ ID NO: 2751 - protein, 20 aa, Artificial Sequence
  Description of Artificial Sequence: Synthetic peptide
  MOD_RES (4)..(4): phosphoserine
EVISVLQKYFFRKNWLRLTW

SEQ ID NO: 2752 - protein, 20 aa, Artificial Sequence
  Description of Artificial Sequence: Synthetic peptide
  MOD_RES (8)..(8): phosphoserine
EVLERKISMFFRKNWLRLTW

SEQ ID NO: 2753 - protein, 21 aa, Artificial Sequence
  Description of Artificial Sequence: Synthetic peptide
  MOD_RES (7)..(7): phosphothreonine
FAFPGSTNSLFFRKNWLRLTW

SEQ ID NO: 2754 - protein, 21 aa, Artificial Sequence
  Description of Artificial Sequence: Synthetic peptide
  MOD_RES (9)..(9): phosphoserine
FAFPGSTNSLFFRKNWLRLTW

SEQ ID NO: 2755 - protein, 21 aa, Artificial Sequence
  Description of Artificial Sequence: Synthetic peptide
  MOD_RES (5)..(5): phosphothreonine
FASPTSPPVLFFRKNWLRLTW

SEQ ID NO: 2756 - protein, 21 aa, Artificial Sequence
  Description of Artificial Sequence: Synthetic peptide
  MOD_RES (6)..(6): phosphoserine
FASPTSPPVLFFRKNWLRLTW

SEQ ID NO: 2757 - protein, 20 aa, Artificial Sequence
  Description of Artificial Sequence: Synthetic peptide
  MOD_RES (8)..(8): phosphoserine
FATIKSASLFFRKNWLRLTW

SEQ ID NO: 2758 - protein, 20 aa, Artificial Sequence
  Description of Artificial Sequence: Synthetic peptide
  MOD_RES (8)..(8): phosphoserine
FATIRTASLFFRKNWLRLTW

SEQ ID NO: 2759 - protein, 24 aa, Artificial Sequence
  Description of Artificial Sequence: Synthetic peptide
  MOD_RES (4)..(4): phosphoserine
FAVSPIPGRGGVLFFRKNWLRLTW

SEQ ID NO: 2760 - protein, 22 aa, Artificial Sequence
  Description of Artificial Sequence: Synthetic peptide
  MOD_RES (3)..(3): oxidized tryptophan
  MOD_RES (4)..(4): phosphoserine
FAWSPLAGEKFFFRKNWLRLTW

SEQ ID NO: 2761 - protein, 22 aa, Artificial Sequence
  Description of Artificial Sequence: Synthetic peptide
  MOD_RES (4)..(4): phosphoserine
FAWSPLAGEKFFFRKNWLRLTW

SEQ ID NO: 2762 - protein, 23 aa, Artificial Sequence
  Description of Artificial Sequence: Synthetic peptide
  MOD_RES (4)..(4): phosphoserine
  MOD_RES (11)..(11): oxidized methionine
FAYSPGGAHGMLFFRKNWLRLTW

SEQ ID NO: 2763 - protein, 20 aa, Artificial Sequence
  Description of Artificial Sequence: Synthetic peptide
  MOD_RES (4)..(4): phosphothreonine
FFFTARTSFFFRKNWLRLTW

SEQ ID NO: 2764 - protein, 19 aa, Artificial Sequence
  Description of Artificial Sequence: Synthetic peptide
  MOD_RES (7)..(7): phosphothreonine
FGGQRLTLFFRKNWLRLTW

SEQ ID NO: 2765 - protein, 20 aa, Artificial Sequence
  Description of Artificial Sequence: Synthetic peptide
  MOD_RES (8)..(8): phosphoserine
FHGISTVSLFFRKNWLRLTW

SEQ ID NO: 2766 - protein, 19 aa, Artificial Sequence
  Description of Artificial Sequence: Synthetic peptide
  MOD_RES (4)..(4): phosphothreonine
FHVTPLKLFFRKNWLRLTW

SEQ ID NO: 2767 - protein, 22 aa, Artificial Sequence
  Description of Artificial Sequence: Synthetic peptide
  MOD_RES (4)..(4): phosphoserine
FIVSPVPESRLFFRKNWLRLTW

SEQ ID NO: 2768 - protein, 21 aa, Artificial Sequence
  Description of Artificial Sequence: Synthetic peptide
  MOD_RES (4)..(4): phosphoserine
FKVSPLTFGRFFRKNWLRLTW

SEQ ID NO: 2769 - protein, 20 aa, Artificial Sequence
  Description of Artificial Sequence: Synthetic peptide
  MOD_RES (4)..(4): phosphoserine
FLDSAYFRLFFRKNWLRLTW

SEQ ID NO: 2770 - protein, 21 aa, Artificial Sequence
  Description of Artificial Sequence: Synthetic peptide
  MOD_RES (4)..(4): phosphoserine
FLDSGTIRGVFFRKNWLRLTW

SEQ ID NO: 2771 - protein, 22 aa, Artificial Sequence
  Description of Artificial Sequence: Synthetic peptide
  MOD_RES (4)..(4): phosphoserine
FLFSPPEVTGRFFRKNWLRLTW

SEQ ID NO: 2772 - protein, 22 aa, Artificial Sequence
  Description of Artificial Sequence: Synthetic peptide
  MOD_RES (5)..(5): phosphoserine
FLKPSTSGDSLFFRKNWLRLTW

SEQ ID NO: 2773 - protein, 22 aa, Artificial Sequence
  Description of Artificial Sequence: Synthetic peptide
  MOD_RES (7)..(7): phosphoserine
FLKPSTSGDSLFFRKNWLRLTW

SEQ ID NO: 2774 - protein, 22 aa, Artificial Sequence
  Description of Artificial Sequence: Synthetic peptide
  MOD_RES (10)..(10): phosphoserine
FLKPSTSGDSLFFRKNWLRLTW

SEQ ID NO: 2775 - protein, 21 aa, Artificial Sequence
  Description of Artificial Sequence: Synthetic peptide
  MOD_RES (9)..(9): phosphoserine
FLNEKARLSYFFRKNWLRLTW

SEQ ID NO: 2776 - protein, 20 aa, Artificial Sequence
  Description of Artificial Sequence: Synthetic peptide
  MOD_RES (3)..(3): phosphoserine
FLSRSIPSLFFRKNWLRLTW

SEQ ID NO: 2777 - protein, 24 aa, Artificial Sequence
  Description of Artificial Sequence: Synthetic peptide
  MOD_RES (5)..(5): phosphoserine
FPDNSDVSSIGRLFFRKNWLRLTW

SEQ ID NO: 2778 - protein, 24 aa, Artificial Sequence
  Description of Artificial Sequence: Synthetic peptide
  MOD_RES (9)..(9): phosphoserine
FPDNSDVSSIGRLFFRKNWLRLTW

SEQ ID NO: 2779 - protein, 20 aa, Artificial Sequence
  Description of Artificial Sequence: Synthetic peptide
  MOD_RES (8)..(8): phosphoserine
FPLMRSKSLFFRKNWLRLTW

SEQ ID NO: 2780 - protein, 22 aa, Artificial Sequence
  Description of Artificial Sequence: Synthetic peptide
  MOD_RES (4)..(4): phosphoserine
FPLSPTKLSQYFFRKNWLRLTW

SEQ ID NO: 2781 - protein, 20 aa, Artificial Sequence
  Description of Artificial Sequence: Synthetic peptide
  MOD_RES (6)..(6): phosphoserine
FPSMPSPRLFFRKNWLRLTW

SEQ ID NO: 2782 - protein, 20 aa, Artificial Sequence
  Description of Artificial Sequence: Synthetic peptide
  MOD_RES (8)..(8): phosphoserine
FQYSKSPSLFFRKNWLRLTW

SEQ ID NO: 2783 - protein, 22 aa, Artificial Sequence
  Description of Artificial Sequence: Synthetic peptide
  MOD_RES (4)..(4): phosphoserine
FRFSPMGVDHMFFRKNWLRLTW

SEQ ID NO: 2784 - protein, 24 aa, Artificial Sequence
  Description of Artificial Sequence: Synthetic peptide
  MOD_RES (7)..(7): phosphothreonine
FRPPPLTPEDVGFFFRKNWLRLTW

SEQ ID NO: 2785 - protein, 25 aa, Artificial Sequence
  Description of Artificial Sequence: Synthetic peptide
  MOD_RES (12)..(12): phosphothreonine
FRRPDIQYPDATDEFFRKNWLRLTW

SEQ ID NO: 2786 - protein, 21 aa, Artificial Sequence
  Description of Artificial Sequence: Synthetic peptide
  MOD_RES (4)..(4): phosphoserine
FRRSDDMFTFFFRKNWLRLTW

SEQ ID NO: 2787 - protein, 20 aa, Artificial Sequence
  Description of Artificial Sequence: Synthetic peptide
  MOD_RES (7)..(7): phosphothreonine
FRYSGKTEYFFRKNWLRLTW

SEQ ID NO: 2788 - protein, 20 aa, Artificial Sequence
  Description of Artificial Sequence: Synthetic peptide
  MOD_RES (6)..(6): phosphoserine
FSFKKSFKLFFRKNWLRLTW

SEQ ID NO: 2789 - protein, 22 aa, Artificial Sequence
  Description of Artificial Sequence: Synthetic peptide
  MOD_RES (4)..(4): phosphoserine
FSFSPGAGAFRFFRKNWLRLTW

SEQ ID NO: 2790 - protein, 23 aa, Artificial Sequence
  Description of Artificial Sequence: Synthetic peptide
  MOD_RES (6)..(6): phosphoserine
  MOD_RES (9)..(9): oxidized methionine
FSLRYSPGMDAYFFRKNWLRLTW

SEQ ID NO: 2791 - protein, 23 aa, Artificial Sequence
  Description of Artificial Sequence: Synthetic peptide
  MOD_RES (6)..(6): phosphoserine
FSLRYSPGMDAYFFRKNWLRLTW

SEQ ID NO: 2792 - protein, 24 aa, Artificial Sequence
  Description of Artificial Sequence: Synthetic peptide
  MOD_RES (7)..(7): phosphoserine
FSRPSMSPTPLDRFFRKNWLRLTW

SEQ ID NO: 2793 - protein, 20 aa, Artificial Sequence
  Description of Artificial Sequence: Synthetic peptide
  MOD_RES (5)..(5): phosphoserine
FSVDSPRIYFFRKNWLRLTW

SEQ ID NO: 2794 - protein, 20 aa, Artificial Sequence
  Description of Artificial Sequence: Synthetic peptide
  MOD_RES (8)..(8): phosphoserine
FTIFRTISVFFRKNWLRLTW

SEQ ID NO: 2795 - protein, 19 aa, Artificial Sequence
  Description of Artificial Sequence: Synthetic peptide
  MOD_RES (2)..(2): phosphothreonine
FTPPVVKRFFRKNWLRLTW

SEQ ID NO: 2796 - protein, 21 aa, Artificial Sequence
  Description of Artificial Sequence: Synthetic peptide
  MOD_RES (4)..(4): phosphoserine
FVLSPIKEPAFFRKNWLRLTW

SEQ ID NO: 2797 - protein, 21 aa, Artificial Sequence
  Description of Artificial Sequence: Synthetic peptide
  MOD_RES (4)..(4): phosphoserine
FVRSPGTGAFFFRKNWLRLTW

SEQ ID NO: 2798 - protein, 20 aa, Artificial Sequence
  Description of Artificial Sequence: Synthetic peptide
  MOD_RES (3)..(3): phosphothreonine
FVTTPTAELFFRKNWLRLTW

SEQ ID NO: 2799 - protein, 20 aa, Artificial Sequence
  Description of Artificial Sequence: Synthetic peptide
  MOD_RES (4)..(4): phosphothreonine
FVTTPTAELFFRKNWLRLTW

SEQ ID NO: 2800 - protein, 20 aa, Artificial Sequence
  Description of Artificial Sequence: Synthetic peptide
  MOD_RES (6)..(6): phosphothreonine
FVTTPTAELFFRKNWLRLTW

SEQ ID NO: 2801 - protein, 21 aa, Artificial Sequence
  Description of Artificial Sequence: Synthetic peptide
  MOD_RES (4)..(4): phosphoserine
FYYSPSGKKFFFRKNWLRLTW

SEQ ID NO: 2802 - protein, 20 aa, Artificial Sequence
  Description of Artificial Sequence: Synthetic peptide
  MOD_RES (4)..(4): phosphoserine
GALSRYLFRFFRKNWLRLTW

SEQ ID NO: 2803 - protein, 21 aa, Artificial Sequence
  Description of Artificial Sequence: Synthetic peptide
  MOD_RES (6)..(6): phosphoserine
GEDPLSPRALFFRKNWLRLTW

SEQ ID NO: 2804 - protein, 21 aa, Artificial Sequence
  Description of Artificial Sequence: Synthetic peptide
  MOD_RES (5)..(5): phosphoserine
GELESIGELFFFRKNWLRLTW

SEQ ID NO: 2805 - protein, 20 aa, Artificial Sequence
  Description of Artificial Sequence: Synthetic peptide
  MOD_RES (3)..(3): oxidized methionine
  MOD_RES (4)..(4): phosphoserine
GEMSPQRFFFFRKNWLRLTW

SEQ ID NO: 2806 - protein, 20 aa, Artificial Sequence
  Description of Artificial Sequence: Synthetic peptide
  MOD_RES (4)..(4): phosphoserine
GEMSPQRFFFFRKNWLRLTW

SEQ ID NO: 2807 - protein, 21 aa, Artificial Sequence
  Description of Artificial Sequence: Synthetic peptide
  MOD_RES (3)..(3): oxidized methionine
  MOD_RES (4)..(4): phosphoserine
GEMSPQRFFFFFRKNWLRLTW

SEQ ID NO: 2808 - protein, 20 aa, Artificial Sequence
  Description of Artificial Sequence: Synthetic peptide
  MOD_RES (5)..(5): phosphoserine
GENKSPLLLFFRKNWLRLTW

SEQ ID NO: 2809 - protein, 27 aa, Artificial Sequence
  Description of Artificial Sequence: Synthetic peptide
  MOD_RES (7)..(7): phosphothreonine
GEPRAPTPPSGTEVTLFFRKNWLRLTW

SEQ ID NO: 2810 - protein, 21 aa, Artificial Sequence
  Description of Artificial Sequence: Synthetic peptide
  MOD_RES (4)..(4): phosphoserine
GEPSPPHDILFFRKNWLRLTW

SEQ ID NO: 2811 - protein, 22 aa, Artificial Sequence
  Description of Artificial Sequence: Synthetic peptide
  MOD_RES (3)..(3): phosphothreonine
GETSPRTKITWFFRKNWLRLTW

SEQ ID NO: 2812 - protein, 22 aa, Artificial Sequence
  Description of Artificial Sequence: Synthetic peptide
  MOD_RES (4)..(4): phosphoserine
GETSPRTKITWFFRKNWLRLTW

SEQ ID NO: 2813 - protein, 22 aa, Artificial Sequence
  Description of Artificial Sequence: Synthetic peptide
  MOD_RES (3)..(3): oxidized tryptophan
  MOD_RES (4)..(4): phosphoserine
GEWSASLPHRFFFRKNWLRLTW

SEQ ID NO: 2814 - protein, 22 aa, Artificial Sequence
  Description of Artificial Sequence: Synthetic peptide
  MOD_RES (3)..(3): oxidized tryptophan
  MOD_RES (6)..(6): phosphoserine
GEWSASLPHRFFFRKNWLRLTW

SEQ ID NO: 2815 - protein, 22 aa, Artificial Sequence
  Description of Artificial Sequence: Synthetic peptide
  MOD_RES (4)..(4): phosphoserine
GEWSASLPHRFFFRKNWLRLTW

SEQ ID NO: 2816 - protein, 21 aa, Artificial Sequence
  Description of Artificial Sequence: Synthetic peptide
  MOD_RES (4)..(4): phosphoserine
GEYSPGTALPFFRKNWLRLTW

SEQ ID NO: 2817 - protein, 21 aa, Artificial Sequence
  Description of Artificial Sequence: Synthetic peptide
  MOD_RES (5)..(5): phosphoserine
GGLTSPGLSYFFRKNWLRLTW

SEQ ID NO: 2818 - protein, 27 aa, Artificial Sequence
  Description of Artificial Sequence: Synthetic peptide
  MOD_RES (15)..(15): phosphoserine
GGSISVQVNSIKFDSEFFRKNWLRLTW

SEQ ID NO: 2819 - protein, 20 aa, Artificial Sequence
  Description of Artificial Sequence: Synthetic peptide
  MOD_RES (4)..(4): phosphoserine
GHGSPFPSLFFRKNWLRLTW

SEQ ID NO: 2820 - protein, 21 aa, Artificial Sequence
  Description of Artificial Sequence: Synthetic peptide
  MOD_RES (6)..(6): phosphothreonine
GIFPGTPLKKFFRKNWLRLTW

SEQ ID NO: 2821 - protein, 21 aa, Artificial Sequence
  Description of Artificial Sequence: Synthetic peptide
  MOD_RES (5)..(5): phosphoserine
GIISSPLTGKFFRKNWLRLTW

SEQ ID NO: 2822 - protein, 21 aa, Artificial Sequence
  Description of Artificial Sequence: Synthetic peptide
  MOD_RES (8)..(8): phosphothreonine
GIISSPLTGKFFRKNWLRLTW

SEQ ID NO: 2823 - protein, 20 aa, Artificial Sequence
  Description of Artificial Sequence: Synthetic peptide
  MOD_RES (3)..(3): oxidized methionine
  MOD_RES (4)..(4): phosphoserine
GIMSPLAKKFFRKNWLRLTW

SEQ ID NO: 2824 - protein, 22 aa, Artificial Sequence
  Description of Artificial Sequence: Synthetic peptide
  MOD_RES (4)..(4): phosphoserine
GLFSPIRSSAFFFRKNWLRLTW

SEQ ID NO: 2825 - protein, 25 aa, Artificial Sequence
  Description of Artificial Sequence: Synthetic peptide
  MOD_RES (4)..(4): phosphoserine
GLLSLSALGSQAHLFFRKNWLRLTW

SEQ ID NO: 2826 - protein, 23 aa, Artificial Sequence
  Description of Artificial Sequence: Synthetic peptide
  MOD_RES (7)..(7): phosphoserine
GLPGGGSPTTFLFFRKNWLRLTW

SEQ ID NO: 2827 - protein, 20 aa, Artificial Sequence
  Description of Artificial Sequence: Synthetic peptide
  MOD_RES (4)..(4): phosphoserine
GLSSLSIHLFFRKNWLRLTW

SEQ ID NO: 2828 - protein, 22 aa, Artificial Sequence
  Description of Artificial Sequence: Synthetic peptide
  MOD_RES (4)..(4): phosphoserine
GLTSPGLSYSLFFRKNWLRLTW

SEQ ID NO: 2829 - protein, 20 aa, Artificial Sequence
  Description of Artificial Sequence: Synthetic peptide
  MOD_RES (3)..(3): phosphothreonine
GLTVSIPGLFFRKNWLRLTW

SEQ ID NO: 2830 - protein, 21 aa, Artificial Sequence
  Description of Artificial Sequence: Synthetic peptide
  MOD_RES (6)..(6): phosphoserine
GMAILSLLLKFFRKNWLRLTW

SEQ ID NO: 2831 - protein, 26 aa, Artificial Sequence
  Description of Artificial Sequence: Synthetic peptide
  MOD_RES (14)..(14): phosphothreonine
GPGHHHKPGLGEGTPFFRKNWLRLTW

SEQ ID NO: 2832 - protein, 20 aa, Artificial Sequence
  Description of Artificial Sequence: Synthetic peptide
  MOD_RES (8)..(8): phosphoserine
GPLSRVKSLFFRKNWLRLTW

SEQ ID NO: 2833 - protein, 20 aa, Artificial Sequence
  Description of Artificial Sequence: Synthetic peptide
  MOD_RES (8)..(8): phosphoserine
GPLVRQISLFFRKNWLRLTW

SEQ ID NO: 2834 - protein, 22 aa, Artificial Sequence
  Description of Artificial Sequence: Synthetic peptide
  MOD_RES (8)..(8): phosphothreonine
GPRAPSPTKPLFFRKNWLRLTW

SEQ ID NO: 2835 - protein, 19 aa, Artificial Sequence
  Description of Artificial Sequence: Synthetic peptide
  MOD_RES (4)..(4): phosphoserine
GPRSASLLFFRKNWLRLTW

SEQ ID NO: 2836 - protein, 21 aa, Artificial Sequence
  Description of Artificial Sequence: Synthetic peptide
  MOD_RES (6)..(6): phosphothreonine
GPRSFTPLSIFFRKNWLRLTW

SEQ ID NO: 2837 - protein, 20 aa, Artificial Sequence
  Description of Artificial Sequence: Synthetic peptide
  MOD_RES (4)..(4): phosphoserine
GPRSPKAWLFFRKNWLRLTW

SEQ ID NO: 2838 - protein, 21 aa, Artificial Sequence
  Description of Artificial Sequence: Synthetic peptide
  MOD_RES (4)..(4): phosphothreonine
GPRTPTQPLLFFRKNWLRLTW

SEQ ID NO: 2839 - protein, 22 aa, Artificial Sequence
  Description of Artificial Sequence: Synthetic peptide
  MOD_RES (4)..(4): phosphoserine
GRNSLSSLPTYFFRKNWLRLTW

SEQ ID NO: 2840 - protein, 20 aa, Artificial Sequence
  Description of Artificial Sequence: Synthetic peptide
  MOD_RES (6)..(6): phosphoserine
GRQSPSFKLFFRKNWLRLTW

SEQ ID NO: 2841 - protein, 21 aa, Artificial Sequence
  Description of Artificial Sequence: Synthetic peptide
  MOD_RES (5)..(5): phosphoserine
GSFASPGRLFFFRKNWLRLTW

SEQ ID NO: 2842 - protein, 20 aa, Artificial Sequence
  Description of Artificial Sequence: Synthetic peptide
  MOD_RES (2)..(2): phosphoserine
GSFRGFPALFFRKNWLRLTW

SEQ ID NO: 2843 - protein, 21 aa, Artificial Sequence
  Description of Artificial Sequence: Synthetic peptide
  MOD_RES (4)..(4): phosphoserine
GSKSPDPYRLFFRKNWLRLTW

SEQ ID NO: 2844 - protein, 20 aa, Artificial Sequence
  Description of Artificial Sequence: Synthetic peptide
  MOD_RES (4)..(4): phosphoserine
GSRSLYNLRFFRKNWLRLTW

SEQ ID NO: 2845 - protein, 20 aa, Artificial Sequence
  Description of Artificial Sequence: Synthetic peptide
  MOD_RES (8)..(8): phosphoserine
GTFPKALSIFFRKNWLRLTW

SEQ ID NO: 2846 - protein, 23 aa, Artificial Sequence
  Description of Artificial Sequence: Synthetic peptide
  MOD_RES (2)..(2): phosphothreonine
GTPLSQAIIHQYFFRKNWLRLTW

SEQ ID NO: 2847 - protein, 22 aa, Artificial Sequence
  Description of Artificial Sequence: Synthetic peptide
  MOD_RES (4)..(4): phosphothreonine
GTVTPPPRLVKFFRKNWLRLTW

SEQ ID NO: 2848 - protein, 24 aa, Artificial Sequence
  Description of Artificial Sequence: Synthetic peptide
  MOD_RES (7)..(7): phosphoserine
GTYVPSSPTRLAYFFRKNWLRLTW

SEQ ID NO: 2849 - protein, 21 aa, Artificial Sequence
  Description of Artificial Sequence: Synthetic peptide
  MOD_RES (5)..(5): phosphoserine
GVIKSPSWQRFFRKNWLRLTW

SEQ ID NO: 2850 - protein, 21 aa, Artificial Sequence
  Description of Artificial Sequence: Synthetic peptide
  MOD_RES (4)..(4): phosphoserine
GVISPQELLKFFRKNWLRLTW

SEQ ID NO: 2851 - protein, 22 aa, Artificial Sequence
  Description of Artificial Sequence: Synthetic peptide
  MOD_RES (4)..(4): phosphoserine
GVISPQELLKKFFRKNWLRLTW

SEQ ID NO: 2852 - protein, 22 aa, Artificial Sequence
  Description of Artificial Sequence: Synthetic peptide
  MOD_RES (4)..(4): phosphoserine
GVLSPDTISSKFFRKNWLRLTW

SEQ ID NO: 2853 - protein, 20 aa, Artificial Sequence
  Description of Artificial Sequence: Synthetic peptide
  MOD_RES (3)..(3): oxidized methionine
  MOD_RES (4)..(4): phosphothreonine
GVMTPLIKRFFRKNWLRLTW

SEQ ID NO: 2854 - protein, 20 aa, Artificial Sequence
  Description of Artificial Sequence: Synthetic peptide
  MOD_RES (4)..(4): phosphothreonine
GVMTPLIKRFFRKNWLRLTW

SEQ ID NO: 2855 - protein, 21 aa, Artificial Sequence
  Description of Artificial Sequence: Synthetic peptide
  MOD_RES (4)..(4): phosphoserine
HEFSSPSHLLFFRKNWLRLTW

SEQ ID NO: 2856 - protein, 21 aa, Artificial Sequence
  Description of Artificial Sequence: Synthetic peptide
  MOD_RES (5)..(5): phosphoserine
HEFSSPSHLLFFRKNWLRLTW

SEQ ID NO: 2857 - protein, 20 aa, Artificial Sequence
  Description of Artificial Sequence: Synthetic peptide
  MOD_RES (4)..(4): phosphoserine
HELSDITELFFRKNWLRLTW

SEQ ID NO: 2858 - protein, 20 aa, Artificial Sequence
  Description of Artificial Sequence: Synthetic peptide
  MOD_RES (6)..(6): phosphoserine
HERSISPLLFFRKNWLRLTW

SEQ ID NO: 2859 - protein, 20 aa, Artificial Sequence
  Description of Artificial Sequence: Synthetic peptide
  MOD_RES (4)..(4): phosphoserine
HFDSPPHLLFFRKNWLRLTW

SEQ ID NO: 2860 - protein, 23 aa, Artificial Sequence
  Description of Artificial Sequence: Synthetic peptide
  MOD_RES (11)..(11): phosphothreonine
HHHKPGLGEGTPFFRKNWLRLTW

SEQ ID NO: 2861 - protein, 21 aa, Artificial Sequence
  Description of Artificial Sequence: Synthetic peptide
  MOD_RES (9)..(9): phosphothreonine
HHPGLGEGTPFFRKNWLRLTW

SEQ ID NO: 2862 - protein, 20 aa, Artificial Sequence
  Description of Artificial Sequence: Synthetic peptide
  MOD_RES (4)..(4): phosphoserine
HKISDYFEYFFRKNWLRLTW

SEQ ID NO: 2863 - protein, 21 aa, Artificial Sequence
  Description of Artificial Sequence: Synthetic peptide
  MOD_RES (5)..(5): phosphothreonine
HLLETTPKSEFFRKNWLRLTW

SEQ ID NO: 2864 - protein, 21 aa, Artificial Sequence
  Description of Artificial Sequence: Synthetic peptide
  MOD_RES (6)..(6): phosphothreonine
HLLETTPKSEFFRKNWLRLTW

SEQ ID NO: 2865 - protein, 20 aa, Artificial Sequence
  Description of Artificial Sequence: Synthetic peptide
  MOD_RES (6)..(6): phosphothreonine
HLLSPTKGIFFRKNWLRLTW

SEQ ID NO: 2866 - protein, 20 aa, Artificial Sequence
  Description of Artificial Sequence: Synthetic peptide
  MOD_RES (4)..(4): phosphoserine
HLNSLDVQLFFRKNWLRLTW

SEQ ID NO: 2867 - protein, 22 aa, Artificial Sequence
  Description of Artificial Sequence: Synthetic peptide
  MOD_RES (4)..(4): phosphoserine
HLPSPPLTQEVFFRKNWLRLTW

SEQ ID NO: 2868 - protein, 20 aa, Artificial Sequence
  Description of Artificial Sequence: Synthetic peptide
  MOD_RES (4)..(4): phosphoserine
HLSSFTMKLFFRKNWLRLTW

SEQ ID NO: 2869 - protein, 20 aa, Artificial Sequence
  Description of Artificial Sequence: Synthetic peptide
  MOD_RES (4)..(4): phosphoserine
HPISPYEHLFFRKNWLRLTW

SEQ ID NO: 2870 - protein, 21 aa, Artificial Sequence
  Description of Artificial Sequence: Synthetic peptide
  MOD_RES (4)..(4): phosphoserine
HPISPYEHLLFFRKNWLRLTW

SEQ ID NO: 2871 - protein, 20 aa, Artificial Sequence
  Description of Artificial Sequence: Synthetic peptide
  MOD_RES (4)..(4): phosphoserine
HPISSEELLFFRKNWLRLTW

SEQ ID NO: 2872 - protein, 20 aa, Artificial Sequence
  Description of Artificial Sequence: Synthetic peptide
  MOD_RES (5)..(5): phosphoserine
HPISSEELLFFRKNWLRLTW

SEQ ID NO: 2873 - protein, 24 aa, Artificial Sequence
  Description of Artificial Sequence: Synthetic peptide
  MOD_RES (4)..(4): phosphoserine
HPISSEELLSLKYFFRKNWLRLTW

SEQ ID NO: 2874 - protein, 24 aa, Artificial Sequence
  Description of Artificial Sequence: Synthetic peptide
  MOD_RES (5)..(5): phosphoserine
HPISSEELLSLKYFFRKNWLRLTW

SEQ ID NO: 2875 - protein, 26 aa, Artificial Sequence
  Description of Artificial Sequence: Synthetic peptide
  MOD_RES (8)..(8): phosphoserine
HPRPVPDSPVSVTRLFFRKNWLRLTW

SEQ ID NO: 2876 - protein, 23 aa, Artificial Sequence
  Description of Artificial Sequence: Synthetic peptide
  MOD_RES (4)..(4): phosphoserine
HPRSPNVLSVALFFRKNWLRLTW

SEQ ID NO: 2877 - protein, 20 aa, Artificial Sequence
  Description of Artificial Sequence: Synthetic peptide
  MOD_RES (3)..(3): phosphoserine
HPSLSAPALFFRKNWLRLTW

SEQ ID NO: 2878 - protein, 20 aa, Artificial Sequence
  Description of Artificial Sequence: Synthetic peptide
  MOD_RES (5)..(5): phosphoserine
HPSLSAPALFFRKNWLRLTW

SEQ ID NO: 2879 - protein, 20 aa, Artificial Sequence
  Description of Artificial Sequence: Synthetic peptide
  MOD_RES (8)..(8): phosphoserine
HPTLQAPSLFFRKNWLRLTW

SEQ ID NO: 2880 - protein, 21 aa, Artificial Sequence
  Description of Artificial Sequence: Synthetic peptide
  MOD_RES (6)..(6): phosphoserine
HPYRNSDPVIFFRKNWLRLTW

SEQ ID NO: 2881 - protein, 20 aa, Artificial Sequence
  Description of Artificial Sequence: Synthetic peptide
  MOD_RES (4)..(4): phosphoserine
  MOD_RES (9)..(9): oxidized tryptophan
HQFSLKENWFFRKNWLRLTW

SEQ ID NO: 2882 - protein, 20 aa, Artificial Sequence
  Description of Artificial Sequence: Synthetic peptide
  MOD_RES (8)..(8): phosphothreonine
HQGKFLQTFFFRKNWLRLTW

SEQ ID NO: 2883 - protein, 20 aa, Artificial Sequence
  Description of Artificial Sequence: Synthetic peptide
  MOD_RES (4)..(4): phosphoserine
HRASKVLFLFFRKNWLRLTW

SEQ ID NO: 2884 - protein, 21 aa, Artificial Sequence
  Description of Artificial Sequence: Synthetic peptide
  MOD_RES (4)..(4): phosphoserine
  MOD_RES (8)..(8): oxidized methionine
HRDSFSRMSLFFRKNWLRLTW

SEQ ID NO: 2885 - protein, 21 aa, Artificial Sequence
  Description of Artificial Sequence: Synthetic peptide
  MOD_RES (4)..(4): phosphoserine
HRDSFSRMSLFFRKNWLRLTW

SEQ ID NO: 2886 - protein, 20 aa, Artificial Sequence
  Description of Artificial Sequence: Synthetic peptide
  MOD_RES (4)..(4): phosphoserine
  MOD_RES (5)..(5): oxidized methionine
HRNSMKVFLFFRKNWLRLTW

SEQ ID NO: 2887 - protein, 20 aa, Artificial Sequence
  Description of Artificial Sequence: Synthetic peptide
  MOD_RES (4)..(4): phosphoserine
HRVSVILKLFFRKNWLRLTW

SEQ ID NO: 2888 - protein, 24 aa, Artificial Sequence
  Description of Artificial Sequence: Synthetic peptide
  MOD_RES (9)..(9): phosphoserine
HSDKRRPPSAELYFFRKNWLRLTW

SEQ ID NO: 2889 - protein, 22 aa, Artificial Sequence
  Description of Artificial Sequence: Synthetic peptide
  MOD_RES (4)..(4): phosphoserine
HSLSLDDIRLYFFRKNWLRLTW

SEQ ID NO: 2890 - protein, 20 aa, Artificial Sequence
  Description of Artificial Sequence: Synthetic peptide
  MOD_RES (4)..(4): phosphoserine
HSVSPDPVLFFRKNWLRLTW

SEQ ID NO: 2891 - protein, 20 aa, Artificial Sequence
  Description of Artificial Sequence: Synthetic peptide
  MOD_RES (4)..(4): phosphoserine
HTISPLDLAFFRKNWLRLTW

SEQ ID NO: 2892 - protein, 21 aa, Artificial Sequence
  Description of Artificial Sequence: Synthetic peptide
  MOD_RES (4)..(4): phosphoserine
HTISPLDLAKFFRKNWLRLTW

SEQ ID NO: 2893 - protein, 22 aa, Artificial Sequence
  Description of Artificial Sequence: Synthetic peptide
  MOD_RES (4)..(4): phosphoserine
HTISPLDLAKLFFRKNWLRLTW

SEQ ID NO: 2894 - protein, 20 aa, Artificial Sequence
  Description of Artificial Sequence: Synthetic peptide
  MOD_RES (4)..(4): phosphoserine
HTISPSFQLFFRKNWLRLTW

SEQ ID NO: 2895 - protein, 20 aa, Artificial Sequence
  Description of Artificial Sequence: Synthetic peptide
  MOD_RES (6)..(6): phosphoserine
HTISPSFQLFFRKNWLRLTW

SEQ ID NO: 2896 - protein, 21 aa, Artificial Sequence
  Description of Artificial Sequence: Synthetic peptide
  MOD_RES (8)..(8): phosphothreonine
HVSLITPTKRFFRKNWLRLTW

SEQ ID NO: 2897 - protein, 20 aa, Artificial Sequence
  Description of Artificial Sequence: Synthetic peptide
  MOD_RES (4)..(4): phosphoserine
HYFSPFRPYFFRKNWLRLTW

SEQ ID NO: 2898 - protein, 22 aa, Artificial Sequence
  Description of Artificial Sequence: Synthetic peptide
  MOD_RES (3)..(3): phosphoserine
HYSSRLGSAIFFFRKNWLRLTW

SEQ ID NO: 2899 - protein, 22 aa, Artificial Sequence
  Description of Artificial Sequence: Synthetic peptide
  MOD_RES (4)..(4): phosphoserine
HYSSRLGSAIFFFRKNWLRLTW

SEQ ID NO: 2900 - protein, 22 aa, Artificial Sequence
  Description of Artificial Sequence: Synthetic peptide
  MOD_RES (8)..(8): phosphoserine
HYSSRLGSAIFFFRKNWLRLTW

SEQ ID NO: 2901 - protein, 20 aa, Artificial Sequence
  Description of Artificial Sequence: Synthetic peptide
  MOD_RES (6)..(6): phosphoserine
IAATKSLSVFFRKNWLRLTW

SEQ ID NO: 2902 - protein, 20 aa, Artificial Sequence
  Description of Artificial Sequence: Synthetic peptide
  MOD_RES (8)..(8): phosphoserine
IEIERILSVFFRKNWLRLTW

SEQ ID NO: 2903 - protein, 20 aa, Artificial Sequence
  Description of Artificial Sequence: Synthetic peptide
  MOD_RES (8)..(8): phosphoserine
IFDLQKTSLFFRKNWLRLTW

SEQ ID NO: 2904 - protein, 23 aa, Artificial Sequence
  Description of Artificial Sequence: Synthetic peptide
  MOD_RES (4)..(4): phosphoserine
IIQSPSSTGLLKFFRKNWLRLTW

SEQ ID NO: 2905 - protein, 22 aa, Artificial Sequence
  Description of Artificial Sequence: Synthetic peptide
  MOD_RES (8)..(8): phosphoserine
ILGPPPPSFHLFFRKNWLRLTW

SEQ ID NO: 2906 - protein, 19 aa, Artificial Sequence
  Description of Artificial Sequence: Synthetic peptide
  MOD_RES (4)..(4): phosphothreonine
ILLTDLIIFFRKNWLRLTW

SEQ ID NO: 2907 - protein, 21 aa, Artificial Sequence
  Description of Artificial Sequence: Synthetic peptide
  MOD_RES (9)..(9): phosphotyrosine
IMKNLQAHYEFFRKNWLRLTW

SEQ ID NO: 2908 - protein, 19 aa, Artificial Sequence
  Description of Artificial Sequence: Synthetic peptide
  MOD_RES (7)..(7): phosphoserine
IPHQRSSLFFRKNWLRLTW

SEQ ID NO: 2909 - protein, 20 aa, Artificial Sequence
  Description of Artificial Sequence: Synthetic peptide
  MOD_RES (4)..(4): phosphoserine
IPKSKFLALFFRKNWLRLTW

SEQ ID NO: 2910 - protein, 20 aa, Artificial Sequence
  Description of Artificial Sequence: Synthetic peptide
  MOD_RES (4)..(4): phosphothreonine
IPMTPTSSFFFRKNWLRLTW

SEQ ID NO: 2911 - protein, 20 aa, Artificial Sequence
  Description of Artificial Sequence: Synthetic peptide
  MOD_RES (6)..(6): phosphothreonine
IPMTPTSSFFFRKNWLRLTW

SEQ ID NO: 2912 - protein, 20 aa, Artificial Sequence
  Description of Artificial Sequence: Synthetic peptide
  MOD_RES (6)..(6): phosphoserine
IPRPLSLIGFFRKNWLRLTW

SEQ ID NO: 2913 - protein, 21 aa, Artificial Sequence
  Description of Artificial Sequence: Synthetic peptide
  MOD_RES (4)..(4): phosphoserine
IPRSFRHLSFFFRKNWLRLTW

SEQ ID NO: 2914 - protein, 20 aa, Artificial Sequence
  Description of Artificial Sequence: Synthetic peptide
  MOD_RES (3)..(3): phosphoserine
  MOD_RES (4)..(4): oxidized methionine
IPSMSHVHLFFRKNWLRLTW

SEQ ID NO: 2915 - protein, 20 aa, Artificial Sequence
  Description of Artificial Sequence: Synthetic peptide
  MOD_RES (3)..(3): phosphoserine
IPSMSHVHLFFRKNWLRLTW

SEQ ID NO: 2916 - protein, 20 aa, Artificial Sequence
  Description of Artificial Sequence: Synthetic peptide
  MOD_RES (3)..(3): phosphoserine
  MOD_RES (9)..(9): oxidized methionine
IPSPLQPEMFFRKNWLRLTW

SEQ ID NO: 2917 - protein, 20 aa, Artificial Sequence
  Description of Artificial Sequence: Synthetic peptide
  MOD_RES (3)..(3): phosphoserine
IPSPLQPEMFFRKNWLRLTW

SEQ ID NO: 2918 - protein, 20 aa, Artificial Sequence
  Description of Artificial Sequence: Synthetic peptide
  MOD_RES (8)..(8): phosphoserine
IPVSKPLSLFFRKNWLRLTW

SEQ ID NO: 2919 - protein, 20 aa, Artificial Sequence
  Description of Artificial Sequence: Synthetic peptide
  MOD_RES (4)..(4): phosphoserine
IPVSRDWELFFRKNWLRLTW

SEQ ID NO: 2920 - protein, 20 aa, Artificial Sequence
  Description of Artificial Sequence: Synthetic peptide
  MOD_RES (8)..(8): phosphoserine
IRFGRKPSLFFRKNWLRLTW

SEQ ID NO: 2921 - protein, 20 aa, Artificial Sequence
  Description of Artificial Sequence: Synthetic peptide
  MOD_RES (4)..(4): phosphoserine
IRPSVLGPLFFRKNWLRLTW

SEQ ID NO: 2922 - protein, 20 aa, Artificial Sequence
  Description of Artificial Sequence: Synthetic peptide
  MOD_RES (4)..(4): phosphoserine
IRRSYFEVFFFRKNWLRLTW

SEQ ID NO: 2923 - protein, 19 aa, Artificial Sequence
  Description of Artificial Sequence: Synthetic peptide
  MOD_RES (7)..(7): phosphoserine
IRYSGHSLFFRKNWLRLTW

SEQ ID NO: 2924 - protein, 21 aa, Artificial Sequence
  Description of Artificial Sequence: Synthetic peptide
  MOD_RES (6)..(6): phosphoserine
ISKKLSFLSWFFRKNWLRLTW

SEQ ID NO: 2925 - protein, 20 aa, Artificial Sequence
  Description of Artificial Sequence: Synthetic peptide
  MOD_RES (8)..(8): phosphoserine
ISLDKLVSIFFRKNWLRLTW

SEQ ID NO: 2926 - protein, 20 aa, Artificial Sequence
  Description of Artificial Sequence: Synthetic peptide
  MOD_RES (2)..(2): phosphoserine
ISSLTTLSIFFRKNWLRLTW

SEQ ID NO: 2927 - protein, 20 aa, Artificial Sequence
  Description of Artificial Sequence: Synthetic peptide
  MOD_RES (3)..(3): phosphoserine
ISSLTTLSIFFRKNWLRLTW

SEQ ID NO: 2928 - protein, 20 aa, Artificial Sequence
  Description of Artificial Sequence: Synthetic peptide
  MOD_RES (3)..(3): phosphoserine
  MOD_RES (5)..(5): oxidized methionine
ISSSMHSLYFFRKNWLRLTW

SEQ ID NO: 2929 - protein, 20 aa, Artificial Sequence
  Description of Artificial Sequence: Synthetic peptide
  MOD_RES (3)..(3): phosphoserine
ISSSMHSLYFFRKNWLRLTW

SEQ ID NO: 2930 - protein, 20 aa, Artificial Sequence
  Description of Artificial Sequence: Synthetic peptide
  MOD_RES (4)..(4): phosphoserine
  MOD_RES (5)..(5): oxidized methionine
ISSSMHSLYFFRKNWLRLTW

SEQ ID NO: 2931 - protein, 20 aa, Artificial Sequence
  Description of Artificial Sequence: Synthetic peptide
  MOD_RES (4)..(4): phosphothreonine
ITITPPEKYFFRKNWLRLTW

SEQ ID NO: 2932 - protein, 21 aa, Artificial Sequence
  Description of Artificial Sequence: Synthetic peptide
  MOD_RES (5)..(5): phosphoserine
ITLLSPKHKYFFRKNWLRLTW

SEQ ID NO: 2933 - protein, 24 aa, Artificial Sequence
  Description of Artificial Sequence: Synthetic peptide
  MOD_RES (2)..(2): phosphothreonine
  MOD_RES (13)..(13): oxidized methionine
ITPPSSEKLVSVMFFRKNWLRLTW

SEQ ID NO: 2934 - protein, 24 aa, Artificial Sequence
  Description of Artificial Sequence: Synthetic peptide
  MOD_RES (2)..(2): phosphothreonine
ITPPSSEKLVSVMFFRKNWLRLTW

SEQ ID NO: 2935 - protein, 20 aa, Artificial Sequence
  Description of Artificial Sequence: Synthetic peptide
  MOD_RES (4)..(4): phosphoserine
ITTSPITVRFFRKNWLRLTW

SEQ ID NO: 2936 - protein, 21 aa, Artificial Sequence
  Description of Artificial Sequence: Synthetic peptide
  MOD_RES (4)..(4): phosphoserine
ITTSPITVRKFFRKNWLRLTW

SEQ ID NO: 2937 - protein, 20 aa, Artificial Sequence
  Description of Artificial Sequence: Synthetic peptide
  MOD_RES (4)..(4): phosphoserine
ITYSPKLERFFRKNWLRLTW

SEQ ID NO: 2938 - protein, 20 aa, Artificial Sequence
  Description of Artificial Sequence: Synthetic peptide
  MOD_RES (6)..(6): phosphoserine
IVLPLSLQRFFRKNWLRLTW

SEQ ID NO: 2939 - protein, 20 aa, Artificial Sequence
  Description of Artificial Sequence: Synthetic peptide
  MOD_RES (3)..(3): phosphoserine
IVSSLRLAYFFRKNWLRLTW

SEQ ID NO: 2940 - protein, 20 aa, Artificial Sequence
  Description of Artificial Sequence: Synthetic peptide
  MOD_RES (4)..(4): phosphoserine
IVSSLRLAYFFRKNWLRLTW

SEQ ID NO: 2941 - protein, 20 aa, Artificial Sequence
  Description of Artificial Sequence: Synthetic peptide
  MOD_RES (4)..(4): phosphoserine
IYDSVKVYFFFRKNWLRLTW

SEQ ID NO: 2942 - protein, 21 aa, Artificial Sequence
  Description of Artificial Sequence: Synthetic peptide
  MOD_RES (6)..(6): phosphoserine
IYRSQSPHYFFFRKNWLRLTW

SEQ ID NO: 2943 - protein, 24 aa, Artificial Sequence
  Description of Artificial Sequence: Synthetic peptide
  MOD_RES (4)..(4): phosphoserine
KAFSESGSNLHALFFRKNWLRLTW

SEQ ID NO: 2944 - protein, 21 aa, Artificial Sequence
  Description of Artificial Sequence: Synthetic peptide
  MOD_RES (4)..(4): phosphoserine
KAFSPVRSVRFFRKNWLRLTW

SEQ ID NO: 2945 - protein, 22 aa, Artificial Sequence
  Description of Artificial Sequence: Synthetic peptide
  MOD_RES (4)..(4): phosphoserine
KAFSPVRSVRKFFRKNWLRLTW

SEQ ID NO: 2946 - protein, 21 aa, Artificial Sequence
  Description of Artificial Sequence: Synthetic peptide
  MOD_RES (4)..(4): phosphothreonine
KAITPPQQPYFFRKNWLRLTW

SEQ ID NO: 2947 - protein, 21 aa, Artificial Sequence
  Description of Artificial Sequence: Synthetic peptide
  MOD_RES (4)..(4): phosphoserine
KASSPGHPAFFFRKNWLRLTW

SEQ ID NO: 2948 - protein, 20 aa, Artificial Sequence
  Description of Artificial Sequence: Synthetic peptide
  MOD_RES (4)..(4): phosphoserine
KAVSFHLVHFFRKNWLRLTW

SEQ ID NO: 2949 - protein, 18 aa, Artificial Sequence
  Description of Artificial Sequence: Synthetic peptide
  MOD_RES (4)..(4): phosphoserine
KAVSLFLFFRKNWLRLTW

SEQ ID NO: 2950 - protein, 22 aa, Artificial Sequence
  Description of Artificial Sequence: Synthetic peptide
  MOD_RES (4)..(4): phosphothreonine
KAYTPVVVTQWFFRKNWLRLTW

SEQ ID NO: 2951 - protein, 20 aa, Artificial Sequence
  Description of Artificial Sequence: Synthetic peptide
  MOD_RES (4)..(4): phosphoserine
KEDSFLQRYFFRKNWLRLTW

SEQ ID NO: 2952 - protein, 20 aa, Artificial Sequence
  Description of Artificial Sequence: Synthetic peptide
  MOD_RES (3)..(3): oxidized methionine
  MOD_RES (6)..(6): phosphothreonine
KEMSPTRQLFFRKNWLRLTW

SEQ ID NO: 2953 - protein, 20 aa, Artificial Sequence
  Description of Artificial Sequence: Synthetic peptide
  MOD_RES (3)..(3): phosphoserine
KESEVFYELFFRKNWLRLTW

SEQ ID NO: 2954 - protein, 20 aa, Artificial Sequence
  Description of Artificial Sequence: Synthetic peptide
  MOD_RES (3)..(3): phosphoserine
KESTLHLVLFFRKNWLRLTW

SEQ ID NO: 2955 - protein, 20 aa, Artificial Sequence
  Description of Artificial Sequence: Synthetic peptide
  MOD_RES (4)..(4): phosphothreonine
KESTLHLVLFFRKNWLRLTW

SEQ ID NO: 2956 - protein, 21 aa, Artificial Sequence
  Description of Artificial Sequence: Synthetic peptide
  MOD_RES (4)..(4): phosphoserine
KFLSPAQYLYFFRKNWLRLTW

SEQ ID NO: 2957 - protein, 21 aa, Artificial Sequence
  Description of Artificial Sequence: Synthetic peptide
  MOD_RES (6)..(6): phosphoserine
KFRDLSPPRYFFRKNWLRLTW

SEQ ID NO: 2958 - protein, 20 aa, Artificial Sequence
  Description of Artificial Sequence: Synthetic peptide
  MOD_RES (3)..(3): phosphoserine
KFSLRAAEFFFRKNWLRLTW

SEQ ID NO: 2959 - protein, 20 aa, Artificial Sequence
  Description of Artificial Sequence: Synthetic peptide
  MOD_RES (4)..(4): phosphoserine
KGFSGTFQLFFRKNWLRLTW

SEQ ID NO: 2960 - protein, 20 aa, Artificial Sequence
  Description of Artificial Sequence: Synthetic peptide
  MOD_RES (8)..(8): phosphoserine
KIFERATSFFFRKNWLRLTW

SEQ ID NO: 2961 - protein, 24 aa, Artificial Sequence
  Description of Artificial Sequence: Synthetic peptide
  MOD_RES (4)..(4): phosphoserine
KIFSKQQGKAFQRFFRKNWLRLTW

SEQ ID NO: 2962 - protein, 19 aa, Artificial Sequence
  Description of Artificial Sequence: Synthetic peptide
  MOD_RES (4)..(4): phosphoserine
KIISIFSGFFRKNWLRLTW

SEQ ID NO: 2963 - protein, 22 aa, Artificial Sequence
  Description of Artificial Sequence: Synthetic peptide
  MOD_RES (4)..(4): phosphoserine
KIISIFSGTEKFFRKNWLRLTW

SEQ ID NO: 2964 - protein, 21 aa, Artificial Sequence
  Description of Artificial Sequence: Synthetic peptide
  MOD_RES (4)..(4): phosphoserine
KIKSLEEIYLFFRKNWLRLTW

SEQ ID NO: 2965 - protein, 20 aa, Artificial Sequence
  Description of Artificial Sequence: Synthetic peptide
  MOD_RES (4)..(4): phosphoserine
KINSLAHLRFFRKNWLRLTW

SEQ ID NO: 2966 - protein, 20 aa, Artificial Sequence
  Description of Artificial Sequence: Synthetic peptide
  MOD_RES (4)..(4): phosphoserine
KISSFTSLKFFRKNWLRLTW

SEQ ID NO: 2967 - protein, 20 aa, Artificial Sequence
  Description of Artificial Sequence: Synthetic peptide
  MOD_RES (6)..(6): phosphothreonine
KISSFTSLKFFRKNWLRLTW

SEQ ID NO: 2968 - protein, 20 aa, Artificial Sequence
  Description of Artificial Sequence: Synthetic peptide
  MOD_RES (7)..(7): phosphoserine
KISSFTSLKFFRKNWLRLTW

SEQ ID NO: 2969 - protein, 20 aa, Artificial Sequence
  Description of Artificial Sequence: Synthetic peptide
  MOD_RES (4)..(4): phosphoserine
KISSLEIKLFFRKNWLRLTW

SEQ ID NO: 2970 - protein, 21 aa, Artificial Sequence
  Description of Artificial Sequence: Synthetic peptide
  MOD_RES (4)..(4): phosphoserine
KKLSLLNGGLFFRKNWLRLTW

SEQ ID NO: 2971 - protein, 20 aa, Artificial Sequence
  Description of Artificial Sequence: Synthetic peptide
  MOD_RES (8)..(8): phosphoserine
KLEGPDVSLFFRKNWLRLTW

SEQ ID NO: 2972 - protein, 21 aa, Artificial Sequence
  Description of Artificial Sequence: Synthetic peptide
  MOD_RES (6)..(6): phosphoserine
KLFHGSLEELFFRKNWLRLTW

SEQ ID NO: 2973 - protein, 21 aa, Artificial Sequence
  Description of Artificial Sequence: Synthetic peptide
  MOD_RES (6)..(6): phosphoserine
KLFPGSPAIYFFRKNWLRLTW

SEQ ID NO: 2974 - protein, 21 aa, Artificial Sequence
  Description of Artificial Sequence: Synthetic peptide
  MOD_RES (4)..(4): phosphoserine
KLHSLIGLGIFFRKNWLRLTW

SEQ ID NO: 2975 - protein, 22 aa, Artificial Sequence
  Description of Artificial Sequence: Synthetic peptide
  MOD_RES (8)..(8): phosphoserine
KLIDIVSSQKVFFRKNWLRLTW

SEQ ID NO: 2976 - protein, 20 aa, Artificial Sequence
  Description of Artificial Sequence: Synthetic peptide
  MOD_RES (4)..(4): phosphoserine
KLKSFTYEYFFRKNWLRLTW

SEQ ID NO: 2977 - protein, 22 aa, Artificial Sequence
  Description of Artificial Sequence: Synthetic peptide
  MOD_RES (7)..(7): phosphoserine
KLLDFGSLSNLFFRKNWLRLTW

SEQ ID NO: 2978 - protein, 23 aa, Artificial Sequence
  Description of Artificial Sequence: Synthetic peptide
  MOD_RES (11)..(11): phosphoserine
KLLEGEESRISLFFRKNWLRLTW

SEQ ID NO: 2979 - protein, 21 aa, Artificial Sequence
  Description of Artificial Sequence: Synthetic peptide
  MOD_RES (4)..(4): phosphoserine
KLLSPILARYFFRKNWLRLTW

SEQ ID NO: 2980 - protein, 20 aa, Artificial Sequence
  Description of Artificial Sequence: Synthetic peptide
  MOD_RES (4)..(4): phosphoserine
KLLSTALHVFFRKNWLRLTW

SEQ ID NO: 2981 - protein, 20 aa, Artificial Sequence
  Description of Artificial Sequence: Synthetic peptide
  MOD_RES (4)..(4): phosphoserine
KLLSYIQRLFFRKNWLRLTW

SEQ ID NO: 2982 - protein, 22 aa, Artificial Sequence
  Description of Artificial Sequence: Synthetic peptide
  MOD_RES (4)..(4): phosphoserine
KLMSDVEDVSLFFRKNWLRLTW

SEQ ID NO: 2983 - protein, 21 aa, Artificial Sequence
  Description of Artificial Sequence: Synthetic peptide
  MOD_RES (4)..(4): phosphoserine
KLMSLGDIRLFFRKNWLRLTW

SEQ ID NO: 2984 - protein, 22 aa, Artificial Sequence
  Description of Artificial Sequence: Synthetic peptide
  MOD_RES (3)..(3): oxidized methionine
  MOD_RES (4)..(4): phosphoserine
KLMSPKADVKLFFRKNWLRLTW

SEQ ID NO: 2985 - protein, 22 aa, Artificial Sequence
  Description of Artificial Sequence: Synthetic peptide
  MOD_RES (4)..(4): phosphoserine
KLMSPVLKQHLFFRKNWLRLTW

SEQ ID NO: 2986 - protein, 20 aa, Artificial Sequence
  Description of Artificial Sequence: Synthetic peptide
  MOD_RES (6)..(6): phosphoserine
KLQEFSKEEFFRKNWLRLTW

SEQ ID NO: 2987 - protein, 22 aa, Artificial Sequence
  Description of Artificial Sequence: Synthetic peptide
  MOD_RES (6)..(6): phosphothreonine
KLRIQTDGDKYFFRKNWLRLTW

SEQ ID NO: 2988 - protein, 21 aa, Artificial Sequence
  Description of Artificial Sequence: Synthetic peptide
  MOD_RES (4)..(4): phosphoserine
KLSSGLLPKLFFRKNWLRLTW

SEQ ID NO: 2989 - protein, 23 aa, Artificial Sequence
  Description of Artificial Sequence: Synthetic peptide
  MOD_RES (3)..(3): oxidized tryptophan
  MOD_RES (4)..(4): phosphothreonine
KLWTLVSEQTRVFFRKNWLRLTW

SEQ ID NO: 2990 - protein, 23 aa, Artificial Sequence
  Description of Artificial Sequence: Synthetic peptide
  MOD_RES (4)..(4): phosphothreonine
KLWTLVSEQTRVFFRKNWLRLTW

SEQ ID NO: 2991 - protein, 21 aa, Artificial Sequence
  Description of Artificial Sequence: Synthetic peptide
  MOD_RES (7)..(7): phosphoserine
KLYRPGSVAYFFRKNWLRLTW

SEQ ID NO: 2992 - protein, 20 aa, Artificial Sequence
  Description of Artificial Sequence: Synthetic peptide
  MOD_RES (4)..(4): phosphoserine
KLYSISSQVFFRKNWLRLTW

SEQ ID NO: 2993 - protein, 21 aa, Artificial Sequence
  Description of Artificial Sequence: Synthetic peptide
  MOD_RES (4)..(4): phosphoserine
KLYSPTSKALFFRKNWLRLTW

SEQ ID NO: 2994 - protein, 21 aa, Artificial Sequence
  Description of Artificial Sequence: Synthetic peptide
  MOD_RES (6)..(6): phosphothreonine
KLYSPTSKALFFRKNWLRLTW

SEQ ID NO: 2995 - protein, 20 aa, Artificial Sequence
  Description of Artificial Sequence: Synthetic peptide
  MOD_RES (5)..(5): phosphotyrosine
KLYTYIQSRFFRKNWLRLTW

SEQ ID NO: 2996 - protein, 21 aa, Artificial Sequence
  Description of Artificial Sequence: Synthetic peptide
  MOD_RES (5)..(5): phosphotyrosine
KLYTYIQSRFFFRKNWLRLTW

SEQ ID NO: 2997 - protein, 21 aa, Artificial Sequence
  Description of Artificial Sequence: Synthetic peptide
  MOD_RES (2)..(2): oxidized methionine
  MOD_RES (4)..(4): phosphoserine
KMDSFLDMQLFFRKNWLRLTW

SEQ ID NO: 2998 - protein, 21 aa, Artificial Sequence
  Description of Artificial Sequence: Synthetic peptide
  MOD_RES (4)..(4): phosphoserine
  MOD_RES (8)..(8): oxidized methionine
KMDSFLDMQLFFRKNWLRLTW

SEQ ID NO: 2999 - protein, 20 aa, Artificial Sequence
  Description of Artificial Sequence: Synthetic peptide
  MOD_RES (2)..(2): oxidized methionine
  MOD_RES (3)..(3): phosphoserine
KMSSYAFFVFFRKNWLRLTW

SEQ ID NO: 3000 - protein, 20 aa, Artificial Sequence
  Description of Artificial Sequence: Synthetic peptide
  MOD_RES (2)..(2): oxidized methionine
  MOD_RES (4)..(4): phosphoserine
KMSSYAFFVFFRKNWLRLTW

SEQ ID NO: 3001 - protein, 20 aa, Artificial Sequence
  Description of Artificial Sequence: Synthetic peptide
  MOD_RES (3)..(3): phosphoserine
KMSSYAFFVFFRKNWLRLTW

SEQ ID NO: 3002 - protein, 20 aa, Artificial Sequence
  Description of Artificial Sequence: Synthetic peptide
  MOD_RES (4)..(4): phosphoserine
KMSSYAFFVFFRKNWLRLTW

SEQ ID NO: 3003 - protein, 22 aa, Artificial Sequence
  Description of Artificial Sequence: Synthetic peptide
  MOD_RES (2)..(2): oxidized methionine
  MOD_RES (3)..(3): phosphoserine
KMSSYAFFVQTFFRKNWLRLTW

SEQ ID NO: 3004 - protein, 22 aa, Artificial Sequence
  Description of Artificial Sequence: Synthetic peptide
  MOD_RES (2)..(2): oxidized methionine
  MOD_RES (4)..(4): phosphoserine
KMSSYAFFVQTFFRKNWLRLTW

SEQ ID NO: 3005 - protein, 22 aa, Artificial Sequence
  Description of Artificial Sequence: Synthetic peptide
  MOD_RES (3)..(3): phosphoserine
KMSSYAFFVQTFFRKNWLRLTW

SEQ ID NO: 3006 - protein, 22 aa, Artificial Sequence
  Description of Artificial Sequence: Synthetic peptide
  MOD_RES (4)..(4): phosphoserine
KMSSYAFFVQTFFRKNWLRLTW

SEQ ID NO: 3007 - protein, 22 aa, Artificial Sequence
  Description of Artificial Sequence: Synthetic peptide
  MOD_RES (4)..(4): phosphoserine
KPASPARRLDLFFRKNWLRLTW

SEQ ID NO: 3008 - protein, 21 aa, Artificial Sequence
  Description of Artificial Sequence: Synthetic peptide
  MOD_RES (9)..(9): phosphoserine
KPDKTLRFSLFFRKNWLRLTW

SEQ ID NO: 3009 - protein, 22 aa, Artificial Sequence
  Description of Artificial Sequence: Synthetic peptide
  MOD_RES (4)..(4): phosphoserine
KPHSPVTGLYLFFRKNWLRLTW

SEQ ID NO: 3010 - protein, 20 aa, Artificial Sequence
  Description of Artificial Sequence: Synthetic peptide
  MOD_RES (4)..(4): phosphoserine
KPLSRVTSLFFRKNWLRLTW

SEQ ID NO: 3011 - protein, 20 aa, Artificial Sequence
  Description of Artificial Sequence: Synthetic peptide
  MOD_RES (4)..(4): phosphoserine
KPPSPGTVLFFRKNWLRLTW

SEQ ID NO: 3012 - protein, 20 aa, Artificial Sequence
  Description of Artificial Sequence: Synthetic peptide
  MOD_RES (7)..(7): phosphothreonine
KPPSPGTVLFFRKNWLRLTW

SEQ ID NO: 3013 - protein, 20 aa, Artificial Sequence
  Description of Artificial Sequence: Synthetic peptide
  MOD_RES (6)..(6): phosphoserine
  MOD_RES (7)..(7): oxidized methionine
KPRPLSMDLFFRKNWLRLTW

SEQ ID NO: 3014 - protein, 21 aa, Artificial Sequence
  Description of Artificial Sequence: Synthetic peptide
  MOD_RES (6)..(6): phosphoserine
KPRSISFPSAFFRKNWLRLTW

SEQ ID NO: 3015 - protein, 21 aa, Artificial Sequence
  Description of Artificial Sequence: Synthetic peptide
  MOD_RES (9)..(9): phosphothreonine
KPSSLRRVTIFFRKNWLRLTW

SEQ ID NO: 3016 - protein, 22 aa, Artificial Sequence
  Description of Artificial Sequence: Synthetic peptide
  MOD_RES (4)..(4): phosphoserine
KPSSPRGSLLLFFRKNWLRLTW

SEQ ID NO: 3017 - protein, 21 aa, Artificial Sequence
  Description of Artificial Sequence: Synthetic peptide
  MOD_RES (4)..(4): phosphoserine
KQKSLTNLSFFFRKNWLRLTW

SEQ ID NO: 3018 - protein, 21 aa, Artificial Sequence
  Description of Artificial Sequence: Synthetic peptide
  MOD_RES (6)..(6): phosphothreonine
KQKSLTNLSFFFRKNWLRLTW

SEQ ID NO: 3019 - protein, 20 aa, Artificial Sequence
  Description of Artificial Sequence: Synthetic peptide
  MOD_RES (4)..(4): phosphoserine
KRASALLNLFFRKNWLRLTW

SEQ ID NO: 3020 - protein, 20 aa, Artificial Sequence
  Description of Artificial Sequence: Synthetic peptide
  MOD_RES (4)..(4): phosphoserine
KRASYELEFFFRKNWLRLTW

SEQ ID NO: 3021 - protein, 21 aa, Artificial Sequence
  Description of Artificial Sequence: Synthetic peptide
  MOD_RES (4)..(4): phosphoserine
KRDSFIGTPYFFRKNWLRLTW

SEQ ID NO: 3022 - protein, 20 aa, Artificial Sequence
  Description of Artificial Sequence: Synthetic peptide
  MOD_RES (4)..(4): phosphoserine
KRFSLDFNLFFRKNWLRLTW

SEQ ID NO: 3023 - protein, 20 aa, Artificial Sequence
  Description of Artificial Sequence: Synthetic peptide
  MOD_RES (4)..(4): phosphoserine
KRISIFLSMFFRKNWLRLTW

SEQ ID NO: 3024 - protein, 23 aa, Artificial Sequence
  Description of Artificial Sequence: Synthetic peptide
  MOD_RES (4)..(4): phosphoserine
KRISISTSGGSFFFRKNWLRLTW

SEQ ID NO: 3025 - protein, 21 aa, Artificial Sequence
  Description of Artificial Sequence: Synthetic peptide
  MOD_RES (5)..(5): phosphoserine
KRLGSLVDEFFFRKNWLRLTW

SEQ ID NO: 3026 - protein, 22 aa, Artificial Sequence
  Description of Artificial Sequence: Synthetic peptide
  MOD_RES (4)..(4): phosphoserine
KRLSVELTSSLFFRKNWLRLTW

SEQ ID NO: 3027 - protein, 23 aa, Artificial Sequence
  Description of Artificial Sequence: Synthetic peptide
  MOD_RES (4)..(4): phosphoserine
KRLSVELTSSLFFFRKNWLRLTW

SEQ ID NO: 3028 - protein, 22 aa, Artificial Sequence
  Description of Artificial Sequence: Synthetic peptide
  MOD_RES (4)..(4): phosphoserine
KRLSVERIYQKFFRKNWLRLTW

SEQ ID NO: 3029 - protein, 20 aa, Artificial Sequence
  Description of Artificial Sequence: Synthetic peptide
  MOD_RES (4)..(4): phosphoserine
KRMSFVMEYFFRKNWLRLTW

SEQ ID NO: 3030 - protein, 20 aa, Artificial Sequence
  Description of Artificial Sequence: Synthetic peptide
  MOD_RES (4)..(4): phosphoserine
KRNSDLLLLFFRKNWLRLTW

SEQ ID NO: 3031 - protein, 21 aa, Artificial Sequence
  Description of Artificial Sequence: Synthetic peptide
  MOD_RES (4)..(4): phosphoserine
KRPSSEDFVFFFRKNWLRLTW

SEQ ID NO: 3032 - protein, 22 aa, Artificial Sequence
  Description of Artificial Sequence: Synthetic peptide
  MOD_RES (4)..(4): phosphoserine
KRPSSEDFVFLFFRKNWLRLTW

SEQ ID NO: 3033 - protein, 22 aa, Artificial Sequence
  Description of Artificial Sequence: Synthetic peptide
  MOD_RES (5)..(5): phosphoserine
KRPSSEDFVFLFFRKNWLRLTW

SEQ ID NO: 3034 - protein, 20 aa, Artificial Sequence
  Description of Artificial Sequence: Synthetic peptide
  MOD_RES (4)..(4): phosphothreonine
KRRTGALVLFFRKNWLRLTW

SEQ ID NO: 3035 - protein, 20 aa, Artificial Sequence
  Description of Artificial Sequence: Synthetic peptide
  MOD_RES (4)..(4): phosphoserine
KRSSISQLLFFRKNWLRLTW

SEQ ID NO: 3036 - protein, 20 aa, Artificial Sequence
  Description of Artificial Sequence: Synthetic peptide
  MOD_RES (4)..(4): phosphoserine
KRVSTFQEFFFRKNWLRLTW

SEQ ID NO: 3037 - protein, 20 aa, Artificial Sequence
  Description of Artificial Sequence: Synthetic peptide
  MOD_RES (4)..(4): phosphothreonine
KRVTWIVEFFFRKNWLRLTW

SEQ ID NO: 3038 - protein, 19 aa, Artificial Sequence
  Description of Artificial Sequence: Synthetic peptide
  MOD_RES (7)..(7): phosphoserine
KRYLFRSFFFRKNWLRLTW

SEQ ID NO: 3039 - protein, 20 aa, Artificial Sequence
  Description of Artificial Sequence: Synthetic peptide
  MOD_RES (4)..(4): phosphoserine
KRYSRSLTIFFRKNWLRLTW

SEQ ID NO: 3040 - protein, 20 aa, Artificial Sequence
  Description of Artificial Sequence: Synthetic peptide
  MOD_RES (4)..(4): phosphoserine
KSASFAFEFFFRKNWLRLTW

SEQ ID NO: 3041 - protein, 20 aa, Artificial Sequence
  Description of Artificial Sequence: Synthetic peptide
  MOD_RES (5)..(5): phosphoserine
KSDGSFIGYFFRKNWLRLTW

SEQ ID NO: 3042 - protein, 22 aa, Artificial Sequence
  Description of Artificial Sequence: Synthetic peptide
  MOD_RES (4)..(4): phosphoserine
KSFSAPATQAYFFRKNWLRLTW

SEQ ID NO: 3043 - protein, 20 aa, Artificial Sequence
  Description of Artificial Sequence: Synthetic peptide
  MOD_RES (8)..(8): phosphothreonine
  MOD_RES (9)..(9): oxidized tryptophan
KSGELLATWFFRKNWLRLTW

SEQ ID NO: 3044 - protein, 20 aa, Artificial Sequence
  Description of Artificial Sequence: Synthetic peptide
  MOD_RES (8)..(8): phosphothreonine
KSGEPLSTWFFRKNWLRLTW

SEQ ID NO: 3045 - protein, 20 aa, Artificial Sequence
  Description of Artificial Sequence: Synthetic peptide
  MOD_RES (4)..(4): phosphoserine
KSKSIEITFFFRKNWLRLTW

SEQ ID NO: 3046 - protein, 21 aa, Artificial Sequence
  Description of Artificial Sequence: Synthetic peptide
  MOD_RES (2)..(2): phosphoserine
  MOD_RES (9)..(9): oxidized methionine
KSLPSDQVMLFFRKNWLRLTW

SEQ ID NO: 3047 - protein, 21 aa, Artificial Sequence
  Description of Artificial Sequence: Synthetic peptide
  MOD_RES (2)..(2): phosphoserine
KSLPSDQVMLFFRKNWLRLTW

SEQ ID NO: 3048 - protein, 22 aa, Artificial Sequence
  Description of Artificial Sequence: Synthetic peptide
  MOD_RES (4)..(4): phosphoserine
KSLSIEIGHEVFFRKNWLRLTW

SEQ ID NO: 3049 - protein, 21 aa, Artificial Sequence
  Description of Artificial Sequence: Synthetic peptide
  MOD_RES (6)..(6): phosphoserine
KSLSPSLLGYFFRKNWLRLTW

SEQ ID NO: 3050 - protein, 24 aa, Artificial Sequence
  Description of Artificial Sequence: Synthetic peptide
  MOD_RES (11)..(11): phosphoserine
KSSEEKRLSISKFFFRKNWLRLTW

SEQ ID NO: 3051 - protein, 20 aa, Artificial Sequence
  Description of Artificial Sequence: Synthetic peptide
  MOD_RES (4)..(4): phosphoserine
KSSSLPRAFFFRKNWLRLTW

SEQ ID NO: 3052 - protein, 21 aa, Artificial Sequence
  Description of Artificial Sequence: Synthetic peptide
  MOD_RES (4)..(4): phosphothreonine
KSVTPTKEFLFFRKNWLRLTW

SEQ ID NO: 3053 - protein, 22 aa, Artificial Sequence
  Description of Artificial Sequence: Synthetic peptide
  MOD_RES (4)..(4): phosphoserine
KTDSDSDLQLYFFRKNWLRLTW

SEQ ID NO: 3054 - protein, 23 aa, Artificial Sequence
  Description of Artificial Sequence: Synthetic peptide
  MOD_RES (4)..(4): phosphoserine
KTISESDLNHSFFFRKNWLRLTW

SEQ ID NO: 3055 - protein, 21 aa, Artificial Sequence
  Description of Artificial Sequence: Synthetic peptide
  MOD_RES (4)..(4): phosphoserine
KTISPKSTVYFFRKNWLRLTW

SEQ ID NO: 3056 - protein, 20 aa, Artificial Sequence
  Description of Artificial Sequence: Synthetic peptide
  MOD_RES (4)..(4): phosphoserine
KTKSMFFFLFFRKNWLRLTW

SEQ ID NO: 3057 - protein, 20 aa, Artificial Sequence
  Description of Artificial Sequence: Synthetic peptide
  MOD_RES (4)..(4): phosphoserine
KTLSLVKELFFRKNWLRLTW

SEQ ID NO: 3058 - protein, 20 aa, Artificial Sequence
  Description of Artificial Sequence: Synthetic peptide
  MOD_RES (3)..(3): oxidized methionine
  MOD_RES (4)..(4): phosphoserine
KTMSGTFLLFFRKNWLRLTW

SEQ ID NO: 3059 - protein, 20 aa, Artificial Sequence
  Description of Artificial Sequence: Synthetic peptide
  MOD_RES (3)..(3): oxidized methionine
  MOD_RES (6)..(6): phosphothreonine
KTMSGTFLLFFRKNWLRLTW

SEQ ID NO: 3060 - protein, 20 aa, Artificial Sequence
  Description of Artificial Sequence: Synthetic peptide
  MOD_RES (6)..(6): phosphothreonine
KTMSGTFLLFFRKNWLRLTW

SEQ ID NO: 3061 - protein, 22 aa, Artificial Sequence
  Description of Artificial Sequence: Synthetic peptide
  MOD_RES (3)..(3): oxidized methionine
  MOD_RES (4)..(4): phosphoserine
KTMSGTFLLRFFFRKNWLRLTW

SEQ ID NO: 3062 - protein, 22 aa, Artificial Sequence
  Description of Artificial Sequence: Synthetic peptide
  MOD_RES (4)..(4): phosphoserine
KTMSGTFLLRFFFRKNWLRLTW

SEQ ID NO: 3063 - protein, 21 aa, Artificial Sequence
  Description of Artificial Sequence: Synthetic peptide
  MOD_RES (2)..(2): phosphothreonine
KTMSPSQMIMFFRKNWLRLTW

SEQ ID NO: 3064 - protein, 20 aa, Artificial Sequence
  Description of Artificial Sequence: Synthetic peptide
  MOD_RES (6)..(6): phosphoserine
KTQRVSLLFFFRKNWLRLTW

SEQ ID NO: 3065 - protein, 22 aa, Artificial Sequence
  Description of Artificial Sequence: Synthetic peptide
  MOD_RES (2)..(2): phosphothreonine
KTRSLSVEIVYFFRKNWLRLTW

SEQ ID NO: 3066 - protein, 22 aa, Artificial Sequence
  Description of Artificial Sequence: Synthetic peptide
  MOD_RES (4)..(4): phosphoserine
KTRSLSVEIVYFFRKNWLRLTW

SEQ ID NO: 3067 - protein, 22 aa, Artificial Sequence
  Description of Artificial Sequence: Synthetic peptide
  MOD_RES (4)..(4): phosphoserine
KTVSPPIRKGWFFRKNWLRLTW

SEQ ID NO: 3068 - protein, 22 aa, Artificial Sequence
  Description of Artificial Sequence: Synthetic peptide
  MOD_RES (4)..(4): phosphoserine
KTVSSTKLVSFFFRKNWLRLTW

SEQ ID NO: 3069 - protein, 21 aa, Artificial Sequence
  Description of Artificial Sequence: Synthetic peptide
  MOD_RES (9)..(9): phosphoserine
KVDGPRSPSYFFRKNWLRLTW

SEQ ID NO: 3070 - protein, 21 aa, Artificial Sequence
  Description of Artificial Sequence: Synthetic peptide
  MOD_RES (4)..(4): phosphoserine
  MOD_RES (10)..(10): oxidized tryptophan
KVESPPLEEWFFRKNWLRLTW

SEQ ID NO: 3071 - protein, 20 aa, Artificial Sequence
  Description of Artificial Sequence: Synthetic peptide
  MOD_RES (4)..(4): phosphoserine
KVFSLPTQLFFRKNWLRLTW

SEQ ID NO: 3072 - protein, 22 aa, Artificial Sequence
  Description of Artificial Sequence: Synthetic peptide
  MOD_RES (4)..(4): phosphoserine
KVFSPVIRSSFFFRKNWLRLTW

SEQ ID NO: 3073 - protein, 21 aa, Artificial Sequence
  Description of Artificial Sequence: Synthetic peptide
  MOD_RES (4)..(4): phosphoserine
KVGSFKFIYVFFRKNWLRLTW

SEQ ID NO: 3074 - protein, 20 aa, Artificial Sequence
  Description of Artificial Sequence: Synthetic peptide
  MOD_RES (4)..(4): phosphoserine
  MOD_RES (5)..(5): oxidized tryptophan
  MOD_RES (9)..(9): oxidized methionine
KVLSWPFLMFFRKNWLRLTW

SEQ ID NO: 3075 - protein, 20 aa, Artificial Sequence
  Description of Artificial Sequence: Synthetic peptide
  MOD_RES (4)..(4): phosphoserine
  MOD_RES (5)..(5): oxidized tryptophan
KVLSWPFLMFFRKNWLRLTW

SEQ ID NO: 3076 - protein, 21 aa, Artificial Sequence
  Description of Artificial Sequence: Synthetic peptide
  MOD_RES (4)..(4): phosphoserine
KWPSKRRIPVFFRKNWLRLTW

SEQ ID NO: 3077 - protein, 21 aa, Artificial Sequence
  Description of Artificial Sequence: Synthetic peptide
  MOD_RES (4)..(4): phosphoserine
KYRSVISDIFFFRKNWLRLTW

SEQ ID NO: 3078 - protein, 22 aa, Artificial Sequence
  Description of Artificial Sequence: Synthetic peptide
  MOD_RES (5)..(5): phosphoserine
LAFPSPEKLLRFFRKNWLRLTW

SEQ ID NO: 3079 - protein, 21 aa, Artificial Sequence
  Description of Artificial Sequence: Synthetic peptide
  MOD_RES (3)..(3): phosphoserine
LASDRCSIHLFFRKNWLRLTW

SEQ ID NO: 3080 - protein, 21 aa, Artificial Sequence
  Description of Artificial Sequence: Synthetic peptide
  MOD_RES (6)..(6): phosphoserine
LEIKESILSLFFRKNWLRLTW

SEQ ID NO: 3081 - protein, 20 aa, Artificial Sequence
  Description of Artificial Sequence: Synthetic peptide
  MOD_RES (4)..(4): phosphoserine
LEISPDNSLFFRKNWLRLTW

SEQ ID NO: 3082 - protein, 20 aa, Artificial Sequence
  Description of Artificial Sequence: Synthetic peptide
  MOD_RES (4)..(4): phosphoserine
LEISVGKSVFFRKNWLRLTW

SEQ ID NO: 3083 - protein, 20 aa, Artificial Sequence
  Description of Artificial Sequence: Synthetic peptide
  MOD_RES (3)..(3): phosphoserine
LESPTTPLLFFRKNWLRLTW

SEQ ID NO: 3084 - protein, 20 aa, Artificial Sequence
  Description of Artificial Sequence: Synthetic peptide
  MOD_RES (5)..(5): phosphothreonine
LESPTTPLLFFRKNWLRLTW

SEQ ID NO: 3085 - protein, 20 aa, Artificial Sequence
  Description of Artificial Sequence: Synthetic peptide
  MOD_RES (6)..(6): phosphothreonine
LESPTTPLLFFRKNWLRLTW

SEQ ID NO: 3086 - protein, 21 aa, Artificial Sequence
  Description of Artificial Sequence: Synthetic peptide
  MOD_RES (7)..(7): phosphoserine
  MOD_RES (9)..(9): oxidized methionine
LGFEVKSKMVFFRKNWLRLTW

SEQ ID NO: 3087 - protein, 21 aa, Artificial Sequence
  Description of Artificial Sequence: Synthetic peptide
  MOD_RES (7)..(7): phosphoserine
LGFEVKSKMVFFRKNWLRLTW

SEQ ID NO: 3088 - protein, 20 aa, Artificial Sequence
  Description of Artificial Sequence: Synthetic peptide
  MOD_RES (3)..(3): oxidized methionine
  MOD_RES (7)..(7): phosphoserine
LGMEVLSGVFFRKNWLRLTW

SEQ ID NO: 3089 - protein, 20 aa, Artificial Sequence
  Description of Artificial Sequence: Synthetic peptide
  MOD_RES (7)..(7): phosphoserine
LGMEVLSGVFFRKNWLRLTW

SEQ ID NO: 3090 - protein, 20 aa, Artificial Sequence
  Description of Artificial Sequence: Synthetic peptide
  MOD_RES (6)..(6): phosphothreonine
LIPDHTIRAFFRKNWLRLTW

SEQ ID NO: 3091 - protein, 19 aa, Artificial Sequence
  Description of Artificial Sequence: Synthetic peptide
  MOD_RES (7)..(7): phosphoserine
LLDIIRSLFFRKNWLRLTW

SEQ ID NO: 3092 - protein, 21 aa, Artificial Sequence
  Description of Artificial Sequence: Synthetic peptide
  MOD_RES (9)..(9): phosphothreonine
LLDPRSYHTYFFRKNWLRLTW

SEQ ID NO: 3093 - protein, 19 aa, Artificial Sequence
  Description of Artificial Sequence: Synthetic peptide
  MOD_RES (3)..(3): phosphoserine
LLSPKHKYFFRKNWLRLTW

SEQ ID NO: 3094 - protein, 22 aa, Artificial Sequence
  Description of Artificial Sequence: Synthetic peptide
  MOD_RES (4)..(4): phosphoserine
LPASPRARLSAFFRKNWLRLTW

SEQ ID NO: 3095 - protein, 20 aa, Artificial Sequence
  Description of Artificial Sequence: Synthetic peptide
  MOD_RES (4)..(4): phosphoserine
LPASPSVSLFFRKNWLRLTW

SEQ ID NO: 3096 - protein, 20 aa, Artificial Sequence
  Description of Artificial Sequence: Synthetic peptide
  MOD_RES (6)..(6): phosphoserine
LPASPSVSLFFRKNWLRLTW

SEQ ID NO: 3097 - protein, 20 aa, Artificial Sequence
  Description of Artificial Sequence: Synthetic peptide
  MOD_RES (6)..(6): phosphoserine
LPDPGSPRLFFRKNWLRLTW

SEQ ID NO: 3098 - protein, 20 aa, Artificial Sequence
  Description of Artificial Sequence: Synthetic peptide
  MOD_RES (4)..(4): phosphoserine
LPESPRLTLFFRKNWLRLTW

SEQ ID NO: 3099 - protein, 22 aa, Artificial Sequence
  Description of Artificial Sequence: Synthetic peptide
  MOD_RES (10)..(10): phosphoserine
LPFSGPREPSLFFRKNWLRLTW

SEQ ID NO: 3100 - protein, 22 aa, Artificial Sequence
  Description of Artificial Sequence: Synthetic peptide
  MOD_RES (5)..(5): phosphoserine
LPFSSSPSRSAFFRKNWLRLTW

SEQ ID NO: 3101 - protein, 22 aa, Artificial Sequence
  Description of Artificial Sequence: Synthetic peptide
  MOD_RES (6)..(6): phosphoserine
LPFSSSPSRSAFFRKNWLRLTW

SEQ ID NO: 3102 - protein, 22 aa, Artificial Sequence
  Description of Artificial Sequence: Synthetic peptide
  MOD_RES (4)..(4): phosphoserine
LPLSSSHLNVYFFRKNWLRLTW

SEQ ID NO: 3103 - protein, 22 aa, Artificial Sequence
  Description of Artificial Sequence: Synthetic peptide
  MOD_RES (5)..(5): phosphoserine
LPLSSSHLNVYFFRKNWLRLTW

SEQ ID NO: 3104 - protein, 22 aa, Artificial Sequence
  Description of Artificial Sequence: Synthetic peptide
  MOD_RES (6)..(6): phosphoserine
LPLSSSHLNVYFFRKNWLRLTW

SEQ ID NO: 3105 - protein, 21 aa, Artificial Sequence
  Description of Artificial Sequence: Synthetic peptide
  MOD_RES (5)..(5): phosphoserine
LPPVSPLKAAFFRKNWLRLTW

SEQ ID NO: 3106 - protein, 22 aa, Artificial Sequence
  Description of Artificial Sequence: Synthetic peptide
  MOD_RES (6)..(6): phosphoserine
LPRGLSPARQLFFRKNWLRLTW

SEQ ID NO: 3107 - protein, 21 aa, Artificial Sequence
  Description of Artificial Sequence: Synthetic peptide
  MOD_RES (8)..(8): phosphoserine
LPRGSSPSVLFFRKNWLRLTW

SEQ ID NO: 3108 - protein, 21 aa, Artificial Sequence
  Description of Artificial Sequence: Synthetic peptide
  MOD_RES (6)..(6): phosphoserine
LPRPLSPTKLFFRKNWLRLTW

SEQ ID NO: 3109 - protein, 21 aa, Artificial Sequence
  Description of Artificial Sequence: Synthetic peptide
  MOD_RES (8)..(8): phosphothreonine
LPRPLSPTKLFFRKNWLRLTW

SEQ ID NO: 3110 - protein, 22 aa, Artificial Sequence
  Description of Artificial Sequence: Synthetic peptide
  MOD_RES (6)..(6): phosphoserine
LPRRLSDSPVFFFRKNWLRLTW

SEQ ID NO: 3111 - protein, 22 aa, Artificial Sequence
  Description of Artificial Sequence: Synthetic peptide
  MOD_RES (8)..(8): phosphoserine
LPRRLSDSPVFFFRKNWLRLTW

SEQ ID NO: 3112 - protein, 21 aa, Artificial Sequence
  Description of Artificial Sequence: Synthetic peptide
  MOD_RES (4)..(4): phosphoserine
LPRSPPLKVLFFRKNWLRLTW

SEQ ID NO: 3113 - protein, 20 aa, Artificial Sequence
  Description of Artificial Sequence: Synthetic peptide
  MOD_RES (4)..(4): phosphoserine
LPRSSRGLLFFRKNWLRLTW

SEQ ID NO: 3114 - protein, 20 aa, Artificial Sequence
  Description of Artificial Sequence: Synthetic peptide
  MOD_RES (5)..(5): phosphoserine
LPRSSRGLLFFRKNWLRLTW

SEQ ID NO: 3115 - protein, 22 aa, Artificial Sequence
  Description of Artificial Sequence: Synthetic peptide
  MOD_RES (6)..(6): phosphoserine
  MOD_RES (7)..(7): oxidized methionine
LPRSSSMAAGLFFRKNWLRLTW

SEQ ID NO: 3116 - protein, 20 aa, Artificial Sequence
  Description of Artificial Sequence: Synthetic peptide
  MOD_RES (8)..(8): phosphoserine
LPSARPLSLFFRKNWLRLTW

SEQ ID NO: 3117 - protein, 19 aa, Artificial Sequence
  Description of Artificial Sequence: Synthetic peptide
  MOD_RES (3)..(3): phosphoserine
  MOD_RES (8)..(8): cysteinylated cysteine
LPSRLTKCFFRKNWLRLTW

SEQ ID NO: 3118 - protein, 19 aa, Artificial Sequence
  Description of Artificial Sequence: Synthetic peptide
  MOD_RES (4)..(4): phosphoserine
  MOD_RES (8)..(8): oxidized methionine
LPTSPLAMFFRKNWLRLTW

SEQ ID NO: 3119 - protein, 21 aa, Artificial Sequence
  Description of Artificial Sequence: Synthetic peptide
  MOD_RES (3)..(3): phosphothreonine
  MOD_RES (8)..(8): oxidized methionine
LPTSPLAMEYFFRKNWLRLTW

SEQ ID NO: 3120 - protein, 21 aa, Artificial Sequence
  Description of Artificial Sequence: Synthetic peptide
  MOD_RES (3)..(3): phosphothreonine
LPTSPLAMEYFFRKNWLRLTW

SEQ ID NO: 3121 - protein, 21 aa, Artificial Sequence
  Description of Artificial Sequence: Synthetic peptide
  MOD_RES (4)..(4): phosphoserine
  MOD_RES (8)..(8): oxidized methionine
LPTSPLAMEYFFRKNWLRLTW

SEQ ID NO: 3122 - protein, 21 aa, Artificial Sequence
  Description of Artificial Sequence: Synthetic peptide
  MOD_RES (4)..(4): phosphoserine
LPTSPLAMEYFFRKNWLRLTW

SEQ ID NO: 3123 - protein, 21 aa, Artificial Sequence
  Description of Artificial Sequence: Synthetic peptide
  MOD_RES (4)..(4): phosphoserine
LPVSPGHRKTFFRKNWLRLTW

SEQ ID NO: 3124 - protein, 22 aa, Artificial Sequence
  Description of Artificial Sequence: Synthetic peptide
  MOD_RES (6)..(6): phosphoserine
LPYPVSPKQKYFFRKNWLRLTW

SEQ ID NO: 3125 - protein, 21 aa, Artificial Sequence
  Description of Artificial Sequence: Synthetic peptide
  MOD_RES (6)..(6): phosphoserine
LQHSFSFAGFFFRKNWLRLTW

SEQ ID NO: 3126 - protein, 20 aa, Artificial Sequence
  Description of Artificial Sequence: Synthetic peptide
  MOD_RES (4)..(4): phosphoserine
LQISPVSSYFFRKNWLRLTW

SEQ ID NO: 3127 - protein, 20 aa, Artificial Sequence
  Description of Artificial Sequence: Synthetic peptide
  MOD_RES (4)..(4): phosphoserine
  MOD_RES (9)..(9): oxidized tryptophan
LSKSSATLWFFRKNWLRLTW

SEQ ID NO: 3128 - protein, 20 aa, Artificial Sequence
  Description of Artificial Sequence: Synthetic peptide
  MOD_RES (4)..(4): phosphothreonine
LSPTKLPSIFFRKNWLRLTW

SEQ ID NO: 3129 - protein, 20 aa, Artificial Sequence
  Description of Artificial Sequence: Synthetic peptide
  MOD_RES (7)..(7): phosphoserine
LSRTFKSLFFFRKNWLRLTW

SEQ ID NO: 3130 - protein, 20 aa, Artificial Sequence
  Description of Artificial Sequence: Synthetic peptide
  MOD_RES (2)..(2): phosphoserine
LSSSVIRELFFRKNWLRLTW

SEQ ID NO: 3131 - protein, 20 aa, Artificial Sequence
  Description of Artificial Sequence: Synthetic peptide
  MOD_RES (3)..(3): phosphoserine
LSSSVIRELFFRKNWLRLTW

SEQ ID NO: 3132 - protein, 20 aa, Artificial Sequence
  Description of Artificial Sequence: Synthetic peptide
  MOD_RES (4)..(4): phosphoserine
LTASQILSRFFRKNWLRLTW

SEQ ID NO: 3133 - protein, 23 aa, Artificial Sequence
  Description of Artificial Sequence: Synthetic peptide
  MOD_RES (5)..(5): phosphoserine
LTDPSSPTISSYFFRKNWLRLTW

SEQ ID NO: 3134 - protein, 23 aa, Artificial Sequence
  Description of Artificial Sequence: Synthetic peptide
  MOD_RES (8)..(8): phosphothreonine
LTDPSSPTISSYFFRKNWLRLTW

SEQ ID NO: 3135 - protein, 19 aa, Artificial Sequence
  Description of Artificial Sequence: Synthetic peptide
  MOD_RES (4)..(4): phosphothreonine
LTKTLIKLFFRKNWLRLTW

SEQ ID NO: 3136 - protein, 20 aa, Artificial Sequence
  Description of Artificial Sequence: Synthetic peptide
  MOD_RES (4)..(4): phosphoserine
LVASPRLEKFFRKNWLRLTW

SEQ ID NO: 3137 - protein, 22 aa, Artificial Sequence
  Description of Artificial Sequence: Synthetic peptide
  MOD_RES (7)..(7): phosphoserine
  MOD_RES (10)..(10): cysteinylated cysteine
LVREPGSQACLFFRKNWLRLTW

SEQ ID NO: 3138 - protein, 22 aa, Artificial Sequence
  Description of Artificial Sequence: Synthetic peptide
  MOD_RES (1)..(1): oxidized methionine
  MOD_RES (4)..(4): phosphoserine
MIISPERLDPFFFRKNWLRLTW

SEQ ID NO: 3139 - protein, 22 aa, Artificial Sequence
  Description of Artificial Sequence: Synthetic peptide
  MOD_RES (4)..(4): phosphoserine
MIISPERLDPFFFRKNWLRLTW

SEQ ID NO: 3140 - protein, 20 aa, Artificial Sequence
  Description of Artificial Sequence: Synthetic peptide
  MOD_RES (4)..(4): phosphoserine
MLPSPNEKLFFRKNWLRLTW

SEQ ID NO: 3141 - protein, 20 aa, Artificial Sequence
  Description of Artificial Sequence: Synthetic peptide
  MOD_RES (8)..(8): phosphothreonine
MPFPAHLTYFFRKNWLRLTW

SEQ ID NO: 3142 - protein, 20 aa, Artificial Sequence
  Description of Artificial Sequence: Synthetic peptide
  MOD_RES (1)..(1): oxidized methionine
  MOD_RES (4)..(4): phosphoserine
MPHSPTLRVFFRKNWLRLTW

SEQ ID NO: 3143 - protein, 20 aa, Artificial Sequence
  Description of Artificial Sequence: Synthetic peptide
  MOD_RES (1)..(1): oxidized methionine
  MOD_RES (6)..(6): phosphothreonine
MPHSPTLRVFFRKNWLRLTW

SEQ ID NO: 3144 - protein, 20 aa, Artificial Sequence
  Description of Artificial Sequence: Synthetic peptide
  MOD_RES (4)..(4): phosphoserine
MPHSPTLRVFFRKNWLRLTW

SEQ ID NO: 3145 - protein, 20 aa, Artificial Sequence
  Description of Artificial Sequence: Synthetic peptide
  MOD_RES (6)..(6): phosphothreonine
MPHSPTLRVFFRKNWLRLTW

SEQ ID NO: 3146 - protein, 20 aa, Artificial Sequence
  Description of Artificial Sequence: Synthetic peptide
  MOD_RES (8)..(8): phosphoserine
MPKFRMPSLFFRKNWLRLTW

SEQ ID NO: 3147 - protein, 20 aa, Artificial Sequence
  Description of Artificial Sequence: Synthetic peptide
  MOD_RES (7)..(7): phosphoserine
MPQDLRSPAFFRKNWLRLTW

SEQ ID NO: 3148 - protein, 21 aa, Artificial Sequence
  Description of Artificial Sequence: Synthetic peptide
  MOD_RES (1)..(1): oxidized methionine
  MOD_RES (6)..(6): phosphoserine
MPREPSATRLFFRKNWLRLTW

SEQ ID NO: 3149 - protein, 21 aa, Artificial Sequence
  Description of Artificial Sequence: Synthetic peptide
  MOD_RES (1)..(1): oxidized methionine
  MOD_RES (6)..(6): phosphoserine
MPRQPSATRLFFRKNWLRLTW

SEQ ID NO: 3150 - protein, 22 aa, Artificial Sequence
  Description of Artificial Sequence: Synthetic peptide
  MOD_RES (1)..(1): oxidized methionine
  MOD_RES (3)..(3): phosphoserine
MPSPATLSHSLFFRKNWLRLTW

SEQ ID NO: 3151 - protein, 22 aa, Artificial Sequence
  Description of Artificial Sequence: Synthetic peptide
  MOD_RES (3)..(3): phosphoserine
MPSPATLSHSLFFRKNWLRLTW

SEQ ID NO: 3152 - protein, 21 aa, Artificial Sequence
  Description of Artificial Sequence: Synthetic peptide
  MOD_RES (3)..(3): phosphoserine
MPSPFRSSALFFRKNWLRLTW

SEQ ID NO: 3153 - protein, 21 aa, Artificial Sequence
  Description of Artificial Sequence: Synthetic peptide
  MOD_RES (1)..(1): oxidized methionine
  MOD_RES (3)..(3): phosphoserine
MPSPGGRITLFFRKNWLRLTW

SEQ ID NO: 3154 - protein, 21 aa, Artificial Sequence
  Description of Artificial Sequence: Synthetic peptide
  MOD_RES (3)..(3): phosphoserine
MPSPGGRITLFFRKNWLRLTW

SEQ ID NO: 3155 - protein, 22 aa, Artificial Sequence
  Description of Artificial Sequence: Synthetic peptide
  MOD_RES (3)..(3): phosphoserine
MPSPIMHPLILFFRKNWLRLTW

SEQ ID NO: 3156 - protein, 22 aa, Artificial Sequence
  Description of Artificial Sequence: Synthetic peptide
  MOD_RES (3)..(3): phosphoserine
MPSPLKGQHTLFFRKNWLRLTW

SEQ ID NO: 3157 - protein, 22 aa, Artificial Sequence
  Description of Artificial Sequence: Synthetic peptide
  MOD_RES (3)..(3): phosphoserine
MPSPSTLKKELFFRKNWLRLTW

SEQ ID NO: 3158 - protein, 20 aa, Artificial Sequence
  Description of Artificial Sequence: Synthetic peptide
  MOD_RES (1)..(1): oxidized methionine
  MOD_RES (3)..(3): phosphoserine
MPSPVSPKLFFRKNWLRLTW

SEQ ID NO: 3159 - protein, 20 aa, Artificial Sequence
  Description of Artificial Sequence: Synthetic peptide
  MOD_RES (1)..(1): oxidized methionine
  MOD_RES (6)..(6): phosphoserine
MPSPVSPKLFFRKNWLRLTW

SEQ ID NO: 3160 - protein, 20 aa, Artificial Sequence
  Description of Artificial Sequence: Synthetic peptide
  MOD_RES (3)..(3): phosphoserine
MPSPVSPKLFFRKNWLRLTW

SEQ ID NO: 3161 - protein, 20 aa, Artificial Sequence
  Description of Artificial Sequence: Synthetic peptide
  MOD_RES (6)..(6): phosphoserine
MPSPVSPKLFFRKNWLRLTW

SEQ ID NO: 3162 - protein, 20 aa, Artificial Sequence
  Description of Artificial Sequence: Synthetic peptide
  MOD_RES (3)..(3): phosphothreonine
MPTSPGVDLFFRKNWLRLTW

SEQ ID NO: 3163 - protein, 20 aa, Artificial Sequence
  Description of Artificial Sequence: Synthetic peptide
  MOD_RES (4)..(4): phosphoserine
MPTSPGVDLFFRKNWLRLTW

SEQ ID NO: 3164 - protein, 20 aa, Artificial Sequence
  Description of Artificial Sequence: Synthetic peptide
  MOD_RES (1)..(1): oxidized methionine
  MOD_RES (4)..(4): phosphoserine
MRLSRELQLFFRKNWLRLTW

SEQ ID NO: 3165 - protein, 19 aa, Artificial Sequence
  Description of Artificial Sequence: Synthetic peptide
  MOD_RES (8)..(8): phosphothreonine
MSKLINHTFFRKNWLRLTW

SEQ ID NO: 3166 - protein, 20 aa, Artificial Sequence
  Description of Artificial Sequence: Synthetic peptide
  MOD_RES (1)..(1): oxidized methionine
  MOD_RES (5)..(5): phosphoserine
MTKSSPLKIFFRKNWLRLTW

SEQ ID NO: 3167 - protein, 19 aa, Artificial Sequence
  Description of Artificial Sequence: Synthetic peptide
  MOD_RES (4)..(4): phosphoserine
NAISLPTIFFRKNWLRLTW

SEQ ID NO: 3168 - protein, 22 aa, Artificial Sequence
  Description of Artificial Sequence: Synthetic peptide
  MOD_RES (4)..(4): phosphoserine
NAVSPSSGPSLFFRKNWLRLTW

SEQ ID NO: 3169 - protein, 21 aa, Artificial Sequence
  Description of Artificial Sequence: Synthetic peptide
  MOD_RES (4)..(4): phosphoserine
NAWSPVMRARFFRKNWLRLTW

SEQ ID NO: 3170 - protein, 21 aa, Artificial Sequence
  Description of Artificial Sequence: Synthetic peptide
  MOD_RES (4)..(4): phosphothreonine
NHVTPPNVSLFFRKNWLRLTW

SEQ ID NO: 3171 - protein, 20 aa, Artificial Sequence
  Description of Artificial Sequence: Synthetic peptide
  MOD_RES (4)..(4): phosphoserine
NIPSFIVRLFFRKNWLRLTW

SEQ ID NO: 3172 - protein, 23 aa, Artificial Sequence
  Description of Artificial Sequence: Synthetic peptide
  MOD_RES (4)..(4): phosphoserine
  MOD_RES (9)..(9): oxidized methionine
NLLSPDGKMISVFFRKNWLRLTW

SEQ ID NO: 3173 - protein, 20 aa, Artificial Sequence
  Description of Artificial Sequence: Synthetic peptide
  MOD_RES (2)..(2): oxidized methionine
  MOD_RES (4)..(4): phosphoserine
NMDSPGPMLFFRKNWLRLTW

SEQ ID NO: 3174 - protein, 20 aa, Artificial Sequence
  Description of Artificial Sequence: Synthetic peptide
  MOD_RES (4)..(4): phosphoserine
  MOD_RES (8)..(8): oxidized methionine
NMDSPGPMLFFRKNWLRLTW

SEQ ID NO: 3175 - protein, 21 aa, Artificial Sequence
  Description of Artificial Sequence: Synthetic peptide
  MOD_RES (5)..(5): phosphoserine
NPIHSPSYPLFFRKNWLRLTW

SEQ ID NO: 3176 - protein, 21 aa, Artificial Sequence
  Description of Artificial Sequence: Synthetic peptide
  MOD_RES (7)..(7): phosphoserine
NPIHSPSYPLFFRKNWLRLTW

SEQ ID NO: 3177 - protein, 20 aa, Artificial Sequence
  Description of Artificial Sequence: Synthetic peptide
  MOD_RES (3)..(3): phosphoserine
  MOD_RES (9)..(9): oxidized methionine
NPSSPEFFMFFRKNWLRLTW

SEQ ID NO: 3178 - protein, 20 aa, Artificial Sequence
  Description of Artificial Sequence: Synthetic peptide
  MOD_RES (3)..(3): phosphoserine
NPSSPEFFMFFRKNWLRLTW

SEQ ID NO: 3179 - protein, 20 aa, Artificial Sequence
  Description of Artificial Sequence: Synthetic peptide
  MOD_RES (4)..(4): phosphoserine
  MOD_RES (9)..(9): oxidized methionine
NPSSPEFFMFFRKNWLRLTW

SEQ ID NO: 3180 - protein, 20 aa, Artificial Sequence
  Description of Artificial Sequence: Synthetic peptide
  MOD_RES (4)..(4): phosphoserine
NPSSPEFFMFFRKNWLRLTW

SEQ ID NO: 3181 - protein, 21 aa, Artificial Sequence
  Description of Artificial Sequence: Synthetic peptide
  MOD_RES (4)..(4): phosphoserine
NQGSPFKSALFFRKNWLRLTW

SEQ ID NO: 3182 - protein, 20 aa, Artificial Sequence
  Description of Artificial Sequence: Synthetic peptide
  MOD_RES (4)..(4): phosphoserine
NRESFQIFLFFRKNWLRLTW

SEQ ID NO: 3183 - protein, 23 aa, Artificial Sequence
  Description of Artificial Sequence: Synthetic peptide
  MOD_RES (4)..(4): phosphoserine
NRFSGGFGARDYFFRKNWLRLTW

SEQ ID NO: 3184 - protein, 20 aa, Artificial Sequence
  Description of Artificial Sequence: Synthetic peptide
  MOD_RES (4)..(4): phosphoserine
NRFSPKASLFFRKNWLRLTW

SEQ ID NO: 3185 - protein, 20 aa, Artificial Sequence
  Description of Artificial Sequence: Synthetic peptide
  MOD_RES (4)..(4): phosphoserine
NRHSLPFSLFFRKNWLRLTW

SEQ ID NO: 3186 - protein, 20 aa, Artificial Sequence
  Description of Artificial Sequence: Synthetic peptide
  MOD_RES (4)..(4): phosphoserine
NRHSLVEKLFFRKNWLRLTW

SEQ ID NO: 3187 - protein, 20 aa, Artificial Sequence
  Description of Artificial Sequence: Synthetic peptide
  MOD_RES (4)..(4): phosphoserine
NRLSLLVQKFFRKNWLRLTW

SEQ ID NO: 3188 - protein, 20 aa, Artificial Sequence
  Description of Artificial Sequence: Synthetic peptide
  MOD_RES (4)..(4): phosphoserine
NRMSRRIVLFFRKNWLRLTW

SEQ ID NO: 3189 - protein, 27 aa, Artificial Sequence
  Description of Artificial Sequence: Synthetic peptide
  MOD_RES (10)..(10): phosphoserine
NRSLHINNISPGNTISFFRKNWLRLTW

SEQ ID NO: 3190 - protein, 20 aa, Artificial Sequence
  Description of Artificial Sequence: Synthetic peptide
  MOD_RES (4)..(4): phosphoserine
NRSSPVHIIFFRKNWLRLTW

SEQ ID NO: 3191 - protein, 20 aa, Artificial Sequence
  Description of Artificial Sequence: Synthetic peptide
  MOD_RES (8)..(8): phosphoserine
NSISSVVSRFFRKNWLRLTW

SEQ ID NO: 3192 - protein, 20 aa, Artificial Sequence
  Description of Artificial Sequence: Synthetic peptide
  MOD_RES (4)..(4): phosphoserine
NSLSPRSSLFFRKNWLRLTW

SEQ ID NO: 3193 - protein, 20 aa, Artificial Sequence
  Description of Artificial Sequence: Synthetic peptide
  MOD_RES (4)..(4): phosphoserine
NSVSPSESLFFRKNWLRLTW

SEQ ID NO: 3194 - protein, 20 aa, Artificial Sequence
  Description of Artificial Sequence: Synthetic peptide
  MOD_RES (4)..(4): phosphoserine
NVLSPLPSQFFRKNWLRLTW

SEQ ID NO: 3195 - protein, 22 aa, Artificial Sequence
  Description of Artificial Sequence: Synthetic peptide
  MOD_RES (4)..(4): phosphoserine
NVLSPLPSQAMFFRKNWLRLTW

SEQ ID NO: 3196 - protein, 20 aa, Artificial Sequence
  Description of Artificial Sequence: Synthetic peptide
  MOD_RES (8)..(8): phosphoserine
NVMKRKFSLFFRKNWLRLTW

SEQ ID NO: 3197 - protein, 21 aa, Artificial Sequence
  Description of Artificial Sequence: Synthetic peptide
  MOD_RES (6)..(6): phosphoserine
PEFPLSPPKKFFRKNWLRLTW

SEQ ID NO: 3198 - protein, 20 aa, Artificial Sequence
  Description of Artificial Sequence: Synthetic peptide
  MOD_RES (4)..(4): phosphoserine
PEVSPRPALFFRKNWLRLTW

SEQ ID NO: 3199 - protein, 19 aa, Artificial Sequence
  Description of Artificial Sequence: Synthetic peptide
  MOD_RES (7)..(7): phosphoserine
PIFSRLSIFFRKNWLRLTW

SEQ ID NO: 3200 - protein, 19 aa, Artificial Sequence
  Description of Artificial Sequence: Synthetic peptide
  MOD_RES (7)..(7): phosphoserine
PVSKPLSLFFRKNWLRLTW

SEQ ID NO: 3201 - protein, 20 aa, Artificial Sequence
  Description of Artificial Sequence: Synthetic peptide
  MOD_RES (4)..(4): phosphoserine
QEASPRPLLFFRKNWLRLTW

SEQ ID NO: 3202 - protein, 20 aa, Artificial Sequence
  Description of Artificial Sequence: Synthetic peptide
  MOD_RES (4)..(4): phosphothreonine
QLMTLENKLFFRKNWLRLTW

SEQ ID NO: 3203 - protein, 22 aa, Artificial Sequence
  Description of Artificial Sequence: Synthetic peptide
  MOD_RES (4)..(4): phosphoserine
QLPSPTATSQLFFRKNWLRLTW

SEQ ID NO: 3204 - protein, 25 aa, Artificial Sequence
  Description of Artificial Sequence: Synthetic peptide
  MOD_RES (9)..(9): phosphoserine
QPRNSLPASPAHQLFFRKNWLRLTW

SEQ ID NO: 3205 - protein, 21 aa, Artificial Sequence
  Description of Artificial Sequence: Synthetic peptide
  MOD_RES (6)..(6): phosphoserine
QPRTPSPLVLFFRKNWLRLTW

SEQ ID NO: 3206 - protein, 20 aa, Artificial Sequence
  Description of Artificial Sequence: Synthetic peptide
  MOD_RES (5)..(5): phosphoserine
QRVPSYDSFFFRKNWLRLTW

SEQ ID NO: 3207 - protein, 23 aa, Artificial Sequence
  Description of Artificial Sequence: Synthetic peptide
  MOD_RES (4)..(4): phosphoserine
QSISFSGLPSGRFFRKNWLRLTW

SEQ ID NO: 3208 - protein, 20 aa, Artificial Sequence
  Description of Artificial Sequence: Synthetic peptide
  MOD_RES (4)..(4): phosphoserine
QSSSWTRVFFFRKNWLRLTW

SEQ ID NO: 3209 - protein, 20 aa, Artificial Sequence
  Description of Artificial Sequence: Synthetic peptide
  MOD_RES (4)..(4): phosphoserine
QTISPLSTYFFRKNWLRLTW

SEQ ID NO: 3210 - protein, 21 aa, Artificial Sequence
  Description of Artificial Sequence: Synthetic peptide
  MOD_RES (6)..(6): phosphothreonine
QTPDFTPTKYFFRKNWLRLTW

SEQ ID NO: 3211 - protein, 20 aa, Artificial Sequence
  Description of Artificial Sequence: Synthetic peptide
  MOD_RES (4)..(4): phosphoserine
QTPSPRLALFFRKNWLRLTW

SEQ ID NO: 3212 - protein, 21 aa, Artificial Sequence
  Description of Artificial Sequence: Synthetic peptide
  MOD_RES (6)..(6): phosphoserine
QTRRPSYLEWFFRKNWLRLTW

SEQ ID NO: 3213 - protein, 20 aa, Artificial Sequence
  Description of Artificial Sequence: Synthetic peptide
  MOD_RES (4)..(4): phosphoserine
RAASIENVLFFRKNWLRLTW

SEQ ID NO: 3214 - protein, 22 aa, Artificial Sequence
  Description of Artificial Sequence: Synthetic peptide
  MOD_RES (4)..(4): phosphoserine
  MOD_RES (11)..(11): oxidized tryptophan
RAASSPDGFFWFFRKNWLRLTW

SEQ ID NO: 3215 - protein, 22 aa, Artificial Sequence
  Description of Artificial Sequence: Synthetic peptide
  MOD_RES (5)..(5): phosphoserine
  MOD_RES (11)..(11): oxidized tryptophan
RAASSPDGFFWFFRKNWLRLTW

SEQ ID NO: 3216 - protein, 20 aa, Artificial Sequence
  Description of Artificial Sequence: Synthetic peptide
  MOD_RES (4)..(4): phosphothreonine
RAATPLPSLFFRKNWLRLTW

SEQ ID NO: 3217 - protein, 21 aa, Artificial Sequence
  Description of Artificial Sequence: Synthetic peptide
  MOD_RES (4)..(4): phosphothreonine
RAATPTLTTFFFRKNWLRLTW

SEQ ID NO: 3218 - protein, 21 aa, Artificial Sequence
  Description of Artificial Sequence: Synthetic peptide
  MOD_RES (6)..(6): phosphothreonine
RAATPTLTTFFFRKNWLRLTW

SEQ ID NO: 3219 - protein, 20 aa, Artificial Sequence
  Description of Artificial Sequence: Synthetic peptide
  MOD_RES (4)..(4): phosphoserine
RAGSFSRFYFFRKNWLRLTW

SEQ ID NO: 3220 - protein, 22 aa, Artificial Sequence
  Description of Artificial Sequence: Synthetic peptide
  MOD_RES (4)..(4): phosphothreonine
  MOD_RES (11)..(11): oxidized methionine
RAHTPTPGIYMFFRKNWLRLTW

SEQ ID NO: 3221 - protein, 22 aa, Artificial Sequence
  Description of Artificial Sequence: Synthetic peptide
  MOD_RES (4)..(4): phosphothreonine
RAHTPTPGIYMFFRKNWLRLTW

SEQ ID NO: 3222 - protein, 22 aa, Artificial Sequence
  Description of Artificial Sequence: Synthetic peptide
  MOD_RES (6)..(6): phosphothreonine
RAHTPTPGIYMFFRKNWLRLTW

SEQ ID NO: 3223 - protein, 20 aa, Artificial Sequence
  Description of Artificial Sequence: Synthetic peptide
  MOD_RES (4)..(4): phosphoserine
RALSHADLFFFRKNWLRLTW

SEQ ID NO: 3224 - protein, 20 aa, Artificial Sequence
  Description of Artificial Sequence: Synthetic peptide
  MOD_RES (4)..(4): phosphoserine
RALSLTRALFFRKNWLRLTW

SEQ ID NO: 3225 - protein, 22 aa, Artificial Sequence
  Description of Artificial Sequence: Synthetic peptide
  MOD_RES (4)..(4): phosphoserine
RANSFVGTAQYFFRKNWLRLTW

SEQ ID NO: 3226 - protein, 21 aa, Artificial Sequence
  Description of Artificial Sequence: Synthetic peptide
  MOD_RES (4)..(4): phosphoserine
RAPSYRTLELFFRKNWLRLTW

SEQ ID NO: 3227 - protein, 21 aa, Artificial Sequence
  Description of Artificial Sequence: Synthetic peptide
  MOD_RES (4)..(4): phosphoserine
RARSPVLWGWFFRKNWLRLTW

SEQ ID NO: 3228 - protein, 21 aa, Artificial Sequence
  Description of Artificial Sequence: Synthetic peptide
  MOD_RES (3)..(3): phosphoserine
RASSLNFLNKFFRKNWLRLTW

SEQ ID NO: 3229 - protein, 21 aa, Artificial Sequence
  Description of Artificial Sequence: Synthetic peptide
  MOD_RES (4)..(4): phosphoserine
RASSLNFLNKFFRKNWLRLTW

SEQ ID NO: 3230 - protein, 20 aa, Artificial Sequence
  Description of Artificial Sequence: Synthetic peptide
  MOD_RES (3)..(3): phosphothreonine
  MOD_RES (9)..(9): oxidized methionine
RATSNVFAMFFRKNWLRLTW

SEQ ID NO: 3231 - protein, 20 aa, Artificial Sequence
  Description of Artificial Sequence: Synthetic peptide
  MOD_RES (3)..(3): phosphothreonine
RATSNVFAMFFRKNWLRLTW

SEQ ID NO: 3232 - protein, 20 aa, Artificial Sequence
  Description of Artificial Sequence: Synthetic peptide
  MOD_RES (4)..(4): phosphoserine
  MOD_RES (9)..(9): oxidized methionine
RATSNVFAMFFRKNWLRLTW

SEQ ID NO: 3233 - protein, 20 aa, Artificial Sequence
  Description of Artificial Sequence: Synthetic peptide
  MOD_RES (4)..(4): phosphoserine
RATSNVFAMFFRKNWLRLTW

SEQ ID NO: 3234 - protein, 21 aa, Artificial Sequence
  Description of Artificial Sequence: Synthetic peptide
  MOD_RES (3)..(3): phosphothreonine
  MOD_RES (9)..(9): oxidized methionine
RATSNVFAMFFFRKNWLRLTW

SEQ ID NO: 3235 - protein, 21 aa, Artificial Sequence
  Description of Artificial Sequence: Synthetic peptide
  MOD_RES (3)..(3): phosphothreonine
RATSNVFAMFFFRKNWLRLTW

SEQ ID NO: 3236 - protein, 21 aa, Artificial Sequence
  Description of Artificial Sequence: Synthetic peptide
  MOD_RES (4)..(4): phosphoserine
  MOD_RES (9)..(9): oxidized methionine
RATSNVFAMFFFRKNWLRLTW

SEQ ID NO: 3237 - protein, 21 aa, Artificial Sequence
  Description of Artificial Sequence: Synthetic peptide
  MOD_RES (4)..(4): phosphoserine
RATSNVFAMFFFRKNWLRLTW

SEQ ID NO: 3238 - protein, 21 aa, Artificial Sequence
  Description of Artificial Sequence: Synthetic peptide
  MOD_RES (4)..(4): phosphoserine
RATSPLVSLYFFRKNWLRLTW

SEQ ID NO: 3239 - protein, 20 aa, Artificial Sequence
  Description of Artificial Sequence: Synthetic peptide
  MOD_RES (4)..(4): phosphoserine
RAVSPFAKIFFRKNWLRLTW

SEQ ID NO: 3240 - protein, 21 aa, Artificial Sequence
  Description of Artificial Sequence: Synthetic peptide
  MOD_RES (4)..(4): phosphoserine
  MOD_RES (10)..(10): oxidized methionine
RAVSPHFDDMFFRKNWLRLTW

SEQ ID NO: 3241 - protein, 21 aa, Artificial Sequence
  Description of Artificial Sequence: Synthetic peptide
  MOD_RES (4)..(4): phosphoserine
RAVSPHFDDMFFRKNWLRLTW

SEQ ID NO: 3242 - protein, 24 aa, Artificial Sequence
  Description of Artificial Sequence: Synthetic peptide
  MOD_RES (4)..(4): phosphoserine
RAYSPLHGGSGSYFFRKNWLRLTW

SEQ ID NO: 3243 - protein, 19 aa, Artificial Sequence
  Description of Artificial Sequence: Synthetic peptide
  MOD_RES (5)..(5): phosphoserine
  MOD_RES (8)..(8): oxidized methionine
REAPSPLMFFRKNWLRLTW

SEQ ID NO: 3244 - protein, 19 aa, Artificial Sequence
  Description of Artificial Sequence: Synthetic peptide
  MOD_RES (5)..(5): phosphoserine
REAPSPLMFFRKNWLRLTW

SEQ ID NO: 3245 - protein, 21 aa, Artificial Sequence
  Description of Artificial Sequence: Synthetic peptide
  MOD_RES (4)..(4): phosphoserine
  MOD_RES (10)..(10): oxidized methionine
REASIELPSMFFRKNWLRLTW

SEQ ID NO: 3246 - protein, 20 aa, Artificial Sequence
  Description of Artificial Sequence: Synthetic peptide
  MOD_RES (4)..(4): phosphoserine
REDSLEFSLFFRKNWLRLTW

SEQ ID NO: 3247 - protein, 20 aa, Artificial Sequence
  Description of Artificial Sequence: Synthetic peptide
  MOD_RES (8)..(8): phosphoserine
REDSLEFSLFFRKNWLRLTW

SEQ ID NO: 3248 - protein, 24 aa, Artificial Sequence
  Description of Artificial Sequence: Synthetic peptide
  MOD_RES (8)..(8): phosphothreonine
REFSGPSTPTGTLFFRKNWLRLTW

SEQ ID NO: 3249 - protein, 24 aa, Artificial Sequence
  Description of Artificial Sequence: Synthetic peptide
  MOD_RES (10)..(10): phosphothreonine
REFSGPSTPTGTLFFRKNWLRLTW

SEQ ID NO: 3250 - protein, 21 aa, Artificial Sequence
  Description of Artificial Sequence: Synthetic peptide
  MOD_RES (4)..(4): oxidized methionine
  MOD_RES (6)..(6): phosphothreonine
REIMGTPEYLFFRKNWLRLTW

SEQ ID NO: 3251 - protein, 21 aa, Artificial Sequence
  Description of Artificial Sequence: Synthetic peptide
  MOD_RES (4)..(4): phosphoserine
RELSAPARLYFFRKNWLRLTW

SEQ ID NO: 3252 - protein, 22 aa, Artificial Sequence
  Description of Artificial Sequence: Synthetic peptide
  MOD_RES (4)..(4): phosphoserine
RELSGTIKEILFFRKNWLRLTW

SEQ ID NO: 3253 - protein, 21 aa, Artificial Sequence
  Description of Artificial Sequence: Synthetic peptide
  MOD_RES (4)..(4): phosphoserine
  MOD_RES (10)..(10): oxidized methionine
RELSPSSLKMFFRKNWLRLTW

SEQ ID NO: 3254 - protein, 21 aa, Artificial Sequence
  Description of Artificial Sequence: Synthetic peptide
  MOD_RES (4)..(4): phosphoserine
RELSPVSFQYFFRKNWLRLTW

SEQ ID NO: 3255 - protein, 22 aa, Artificial Sequence
  Description of Artificial Sequence: Synthetic peptide
  MOD_RES (4)..(4): phosphoserine
REPSESSPLALFFRKNWLRLTW

SEQ ID NO: 3256 - protein, 22 aa, Artificial Sequence
  Description of Artificial Sequence: Synthetic peptide
  MOD_RES (7)..(7): phosphoserine
REPSESSPLALFFRKNWLRLTW

SEQ ID NO: 3257 - protein, 22 aa, Artificial Sequence
  Description of Artificial Sequence: Synthetic peptide
  MOD_RES (4)..(4): phosphoserine
REPSPLPELALFFRKNWLRLTW

SEQ ID NO: 3258 - protein, 22 aa, Artificial Sequence
  Description of Artificial Sequence: Synthetic peptide
  MOD_RES (4)..(4): phosphoserine
REPSPVRYDNLFFRKNWLRLTW

SEQ ID NO: 3259 - protein, 20 aa, Artificial Sequence
  Description of Artificial Sequence: Synthetic peptide
  MOD_RES (6)..(6): phosphoserine
RERAFSVKFFFRKNWLRLTW

SEQ ID NO: 3260 - protein, 20 aa, Artificial Sequence
  Description of Artificial Sequence: Synthetic peptide
  MOD_RES (3)..(3): phosphoserine
RESPIPIEIFFRKNWLRLTW

SEQ ID NO: 3261 - protein, 20 aa, Artificial Sequence
  Description of Artificial Sequence: Synthetic peptide
  MOD_RES (3)..(3): phosphoserine
RESPRPLQLFFRKNWLRLTW

SEQ ID NO: 3262 - protein, 20 aa, Artificial Sequence
  Description of Artificial Sequence: Synthetic peptide
  MOD_RES (4)..(4): phosphoserine
RESSLGFQLFFRKNWLRLTW

SEQ ID NO: 3263 - protein, 21 aa, Artificial Sequence
  Description of Artificial Sequence: Synthetic peptide
  MOD_RES (7)..(7): phosphoserine
RETNLDSLPLFFRKNWLRLTW

SEQ ID NO: 3264 - protein, 20 aa, Artificial Sequence
  Description of Artificial Sequence: Synthetic peptide
  MOD_RES (4)..(4): phosphoserine
RETSMVHELFFRKNWLRLTW

SEQ ID NO: 3265 - protein, 21 aa, Artificial Sequence
  Description of Artificial Sequence: Synthetic peptide
  MOD_RES (4)..(4): phosphoserine
RETSPNRIGLFFRKNWLRLTW

SEQ ID NO: 3266 - protein, 20 aa, Artificial Sequence
  Description of Artificial Sequence: Synthetic peptide
  MOD_RES (4)..(4): phosphoserine
REVSPEPIVFFRKNWLRLTW

SEQ ID NO: 3267 - protein, 20 aa, Artificial Sequence
  Description of Artificial Sequence: Synthetic peptide
  MOD_RES (4)..(4): phosphoserine
  MOD_RES (5)..(5): oxidized methionine
RFQSMPVRLFFRKNWLRLTW

SEQ ID NO: 3268 - protein, 20 aa, Artificial Sequence
  Description of Artificial Sequence: Synthetic peptide
  MOD_RES (4)..(4): phosphoserine
RFQSMPVRLFFRKNWLRLTW

SEQ ID NO: 3269 - protein, 20 aa, Artificial Sequence
  Description of Artificial Sequence: Synthetic peptide
  MOD_RES (4)..(4): phosphoserine
RHKSDSISLFFRKNWLRLTW

SEQ ID NO: 3270 - protein, 20 aa, Artificial Sequence
  Description of Artificial Sequence: Synthetic peptide
  MOD_RES (5)..(5): phosphoserine
RHLPSPPTLFFRKNWLRLTW

SEQ ID NO: 3271 - protein, 20 aa, Artificial Sequence
  Description of Artificial Sequence: Synthetic peptide
  MOD_RES (4)..(4): phosphoserine
RIGSDPLAYFFRKNWLRLTW

SEQ ID NO: 3272 - protein, 21 aa, Artificial Sequence
  Description of Artificial Sequence: Synthetic peptide
  MOD_RES (5)..(5): phosphothreonine
RIIETPPHRYFFRKNWLRLTW

SEQ ID NO: 3273 - protein, 21 aa, Artificial Sequence
  Description of Artificial Sequence: Synthetic peptide
  MOD_RES (7)..(7): phosphotyrosine
RIKLGDYHFYFFRKNWLRLTW

SEQ ID NO: 3274 - protein, 20 aa, Artificial Sequence
  Description of Artificial Sequence: Synthetic peptide
  MOD_RES (5)..(5): phosphoserine
RILFSPFFHFFRKNWLRLTW

SEQ ID NO: 3275 - protein, 23 aa, Artificial Sequence
  Description of Artificial Sequence: Synthetic peptide
  MOD_RES (4)..(4): phosphoserine
RILSATTSGIFLFFRKNWLRLTW

SEQ ID NO: 3276 - protein, 22 aa, Artificial Sequence
  Description of Artificial Sequence: Synthetic peptide
  MOD_RES (4)..(4): phosphoserine
RILSDVTHSAVFFRKNWLRLTW

SEQ ID NO: 3277 - protein, 21 aa, Artificial Sequence
  Description of Artificial Sequence: Synthetic peptide
  MOD_RES (4)..(4): phosphoserine
  MOD_RES (10)..(10): oxidized methionine
RILSGVVTKMFFRKNWLRLTW

SEQ ID NO: 3278 - protein, 21 aa, Artificial Sequence
  Description of Artificial Sequence: Synthetic peptide
  MOD_RES (4)..(4): phosphoserine
RILSGVVTKMFFRKNWLRLTW

SEQ ID NO: 3279 - protein, 23 aa, Artificial Sequence
  Description of Artificial Sequence: Synthetic peptide
  MOD_RES (4)..(4): phosphoserine
RILSGVVTKMKMFFRKNWLRLTW

SEQ ID NO: 3280 - protein, 23 aa, Artificial Sequence
  Description of Artificial Sequence: Synthetic peptide
  MOD_RES (4)..(4): phosphoserine
RIMSPMRTGNTYFFRKNWLRLTW

SEQ ID NO: 3281 - protein, 21 aa, Artificial Sequence
  Description of Artificial Sequence: Synthetic peptide
  MOD_RES (4)..(4): phosphoserine
RIQSPLNNKLFFRKNWLRLTW

SEQ ID NO: 3282 - protein, 20 aa, Artificial Sequence
  Description of Artificial Sequence: Synthetic peptide
  MOD_RES (4)..(4): phosphoserine
RIRSIEALLFFRKNWLRLTW

SEQ ID NO: 3283 - protein, 20 aa, Artificial Sequence
  Description of Artificial Sequence: Synthetic peptide
  MOD_RES (3)..(3): phosphothreonine
RITSLIVHVFFRKNWLRLTW

SEQ ID NO: 3284 - protein, 21 aa, Artificial Sequence
  Description of Artificial Sequence: Synthetic peptide
  MOD_RES (4)..(4): phosphoserine
RITSPVHVSFFFRKNWLRLTW

SEQ ID NO: 3285 - protein, 22 aa, Artificial Sequence
  Description of Artificial Sequence: Synthetic peptide
  MOD_RES (4)..(4): phosphoserine
RIVSPKNSDLKFFRKNWLRLTW

SEQ ID NO: 3286 - protein, 20 aa, Artificial Sequence
  Description of Artificial Sequence: Synthetic peptide
  MOD_RES (4)..(4): phosphoserine
RIWSPTIGRFFRKNWLRLTW

SEQ ID NO: 3287 - protein, 20 aa, Artificial Sequence
  Description of Artificial Sequence: Synthetic peptide
  MOD_RES (6)..(6): phosphothreonine
RIWSPTIGRFFRKNWLRLTW

SEQ ID NO: 3288 - protein, 22 aa, Artificial Sequence
  Description of Artificial Sequence: Synthetic peptide
  MOD_RES (4)..(4): phosphoserine
RIYSRIDRLEAFFRKNWLRLTW

SEQ ID NO: 3289 - protein, 20 aa, Artificial Sequence
  Description of Artificial Sequence: Synthetic peptide
  MOD_RES (4)..(4): phosphoserine
RKFSAPGQLFFRKNWLRLTW

SEQ ID NO: 3290 - protein, 20 aa, Artificial Sequence
  Description of Artificial Sequence: Synthetic peptide
  MOD_RES (4)..(4): phosphoserine
RKLSFTESLFFRKNWLRLTW

SEQ ID NO: 3291 - protein, 20 aa, Artificial Sequence
  Description of Artificial Sequence: Synthetic peptide
  MOD_RES (6)..(6): phosphothreonine
RKLSFTESLFFRKNWLRLTW

SEQ ID NO: 3292 - protein, 21 aa, Artificial Sequence
  Description of Artificial Sequence: Synthetic peptide
  MOD_RES (4)..(4): phosphoserine
RKLSGDQITLFFRKNWLRLTW

SEQ ID NO: 3293 - protein, 20 aa, Artificial Sequence
  Description of Artificial Sequence: Synthetic peptide
  MOD_RES (4)..(4): phosphoserine
RKLSVALAFFFRKNWLRLTW

SEQ ID NO: 3294 - protein, 20 aa, Artificial Sequence
  Description of Artificial Sequence: Synthetic peptide
  MOD_RES (4)..(4): phosphoserine
RKLSVLLLLFFRKNWLRLTW

SEQ ID NO: 3295 - protein, 20 aa, Artificial Sequence
  Description of Artificial Sequence: Synthetic peptide
  MOD_RES (4)..(4): phosphoserine
  MOD_RES (7)..(7): oxidized methionine
RKNSFVMEYFFRKNWLRLTW

SEQ ID NO: 3296 - protein, 20 aa, Artificial Sequence
  Description of Artificial Sequence: Synthetic peptide
  MOD_RES (4)..(4): phosphoserine
RKNSFVMEYFFRKNWLRLTW

SEQ ID NO: 3297 - protein, 20 aa, Artificial Sequence
  Description of Artificial Sequence: Synthetic peptide
  MOD_RES (4)..(4): phosphoserine
RKNSLISSLFFRKNWLRLTW

SEQ ID NO: 3298 - protein, 20 aa, Artificial Sequence
  Description of Artificial Sequence: Synthetic peptide
  MOD_RES (4)..(4): phosphoserine
  MOD_RES (9)..(9): oxidized methionine
RKSSIIIRMFFRKNWLRLTW

SEQ ID NO: 3299 - protein, 20 aa, Artificial Sequence
  Description of Artificial Sequence: Synthetic peptide
  MOD_RES (4)..(4): phosphoserine
RLASLFSSLFFRKNWLRLTW

SEQ ID NO: 3300 - protein, 21 aa, Artificial Sequence
  Description of Artificial Sequence: Synthetic peptide
  MOD_RES (4)..(4): phosphoserine
RLASLMNLGMFFRKNWLRLTW

SEQ ID NO: 3301 - protein, 20 aa, Artificial Sequence
  Description of Artificial Sequence: Synthetic peptide
  MOD_RES (4)..(4): phosphoserine
RLASYLEKVFFRKNWLRLTW

SEQ ID NO: 3302 - protein, 20 aa, Artificial Sequence
  Description of Artificial Sequence: Synthetic peptide
  MOD_RES (4)..(4): phosphoserine
RLDSELKELFFRKNWLRLTW

SEQ ID NO: 3303 - protein, 21 aa, Artificial Sequence
  Description of Artificial Sequence: Synthetic peptide
  MOD_RES (4)..(4): phosphoserine
RLDSGHVWKLFFRKNWLRLTW

SEQ ID NO: 3304 - protein, 20 aa, Artificial Sequence
  Description of Artificial Sequence: Synthetic peptide
  MOD_RES (4)..(4): phosphoserine
  MOD_RES (9)..(9): cysteinylated cysteine
RLFSKELRCFFRKNWLRLTW

SEQ ID NO: 3305 - protein, 21 aa, Artificial Sequence
  Description of Artificial Sequence: Synthetic peptide
  MOD_RES (4)..(4): phosphoserine
RLFSKSIETLFFRKNWLRLTW

SEQ ID NO: 3306 - protein, 20 aa, Artificial Sequence
  Description of Artificial Sequence: Synthetic peptide
  MOD_RES (4)..(4): phosphoserine
RLFSSFLKRFFRKNWLRLTW

SEQ ID NO: 3307 - protein, 21 aa, Artificial Sequence
  Description of Artificial Sequence: Synthetic peptide
  MOD_RES (4)..(4): phosphoserine
RLISLSEQNLFFRKNWLRLTW

SEQ ID NO: 3308 - protein, 21 aa, Artificial Sequence
  Description of Artificial Sequence: Synthetic peptide
  MOD_RES (6)..(6): phosphoserine
RLISLSEQNLFFRKNWLRLTW

SEQ ID NO: 3309 - protein, 20 aa, Artificial Sequence
  Description of Artificial Sequence: Synthetic peptide
  MOD_RES (4)..(4): phosphoserine
RLISQIVSSFFRKNWLRLTW

SEQ ID NO: 3310 - protein, 23 aa, Artificial Sequence
  Description of Artificial Sequence: Synthetic peptide
  MOD_RES (4)..(4): phosphoserine
RLISQIVSSITAFFRKNWLRLTW

SEQ ID NO: 3311 - protein, 20 aa, Artificial Sequence
  Description of Artificial Sequence: Synthetic peptide
  MOD_RES (4)..(4): phosphoserine
RLISVVSHLFFRKNWLRLTW

SEQ ID NO: 3312 - protein, 23 aa, Artificial Sequence
  Description of Artificial Sequence: Synthetic peptide
  MOD_RES (4)..(4): phosphoserine
RLKSIEERQLLKFFRKNWLRLTW

SEQ ID NO: 3313 - protein, 22 aa, Artificial Sequence
  Description of Artificial Sequence: Synthetic peptide
  MOD_RES (6)..(6): phosphoserine
RLLQDSVDFSLFFRKNWLRLTW

SEQ ID NO: 3314 - protein, 21 aa, Artificial Sequence
  Description of Artificial Sequence: Synthetic peptide
  MOD_RES (6)..(6): phosphoserine
RLLQDSVDSLFFRKNWLRLTW

SEQ ID NO: 3315 - protein, 20 aa, Artificial Sequence
  Description of Artificial Sequence: Synthetic peptide
  MOD_RES (4)..(4): phosphoserine
RLLSAAENFFFRKNWLRLTW

SEQ ID NO: 3316 - protein, 21 aa, Artificial Sequence
  Description of Artificial Sequence: Synthetic peptide
  MOD_RES (4)..(4): phosphoserine
RLLSEKILGLFFRKNWLRLTW

SEQ ID NO: 3317 - protein, 22 aa, Artificial Sequence
  Description of Artificial Sequence: Synthetic peptide
  MOD_RES (4)..(4): phosphoserine
RLLSIKEAFRLFFRKNWLRLTW

SEQ ID NO: 3318 - protein, 20 aa, Artificial Sequence
  Description of Artificial Sequence: Synthetic peptide
  MOD_RES (4)..(4): phosphoserine
RLLSVNIRVFFRKNWLRLTW

SEQ ID NO: 3319 - protein, 22 aa, Artificial Sequence
  Description of Artificial Sequence: Synthetic peptide
  MOD_RES (4)..(4): phosphoserine
RLNSPPSSIYKFFRKNWLRLTW

SEQ ID NO: 3320 - protein, 20 aa, Artificial Sequence
  Description of Artificial Sequence: Synthetic peptide
  MOD_RES (6)..(6): phosphoserine
RLPLPSPALFFRKNWLRLTW

SEQ ID NO: 3321 - protein, 21 aa, Artificial Sequence
  Description of Artificial Sequence: Synthetic peptide
  MOD_RES (4)..(4): phosphoserine
RLPSDPFTHLFFRKNWLRLTW

SEQ ID NO: 3322 - protein, 23 aa, Artificial Sequence
  Description of Artificial Sequence: Synthetic peptide
  MOD_RES (4)..(4): phosphoserine
RLPSPTSPFSSLFFRKNWLRLTW

SEQ ID NO: 3323 - protein, 20 aa, Artificial Sequence
  Description of Artificial Sequence: Synthetic peptide
  MOD_RES (5)..(5): phosphoserine
RLPSSTLKRFFRKNWLRLTW

SEQ ID NO: 3324 - protein, 20 aa, Artificial Sequence
  Description of Artificial Sequence: Synthetic peptide
  MOD_RES (4)..(4): phosphothreonine
RLPTVLLKLFFRKNWLRLTW

SEQ ID NO: 3325 - protein, 19 aa, Artificial Sequence
  Description of Artificial Sequence: Synthetic peptide
  MOD_RES (7)..(7): phosphoserine
RLQHSFSFFFRKNWLRLTW

SEQ ID NO: 3326 - protein, 20 aa, Artificial Sequence
  Description of Artificial Sequence: Synthetic peptide
  MOD_RES (4)..(4): phosphoserine
RLRSSVPGVFFRKNWLRLTW

SEQ ID NO: 3327 - protein, 20 aa, Artificial Sequence
  Description of Artificial Sequence: Synthetic peptide
  MOD_RES (5)..(5): phosphoserine
RLRSSVPGVFFRKNWLRLTW

SEQ ID NO: 3328 - protein, 20 aa, Artificial Sequence
  Description of Artificial Sequence: Synthetic peptide
  MOD_RES (4)..(4): phosphoserine
  MOD_RES (8)..(8): oxidized methionine
RLRSYEDMIFFRKNWLRLTW

SEQ ID NO: 3329 - protein, 20 aa, Artificial Sequence
  Description of Artificial Sequence: Synthetic peptide
  MOD_RES (3)..(3): phosphoserine
RLSPVPVPRFFRKNWLRLTW

SEQ ID NO: 3330 - protein, 20 aa, Artificial Sequence
  Description of Artificial Sequence: Synthetic peptide
  MOD_RES (3)..(3): phosphoserine
RLSSVSVTYFFRKNWLRLTW

SEQ ID NO: 3331 - protein, 20 aa, Artificial Sequence
  Description of Artificial Sequence: Synthetic peptide
  MOD_RES (4)..(4): phosphoserine
RLSSVSVTYFFRKNWLRLTW

SEQ ID NO: 3332 - protein, 22 aa, Artificial Sequence
  Description of Artificial Sequence: Synthetic peptide
  MOD_RES (4)..(4): phosphothreonine
RLWTPPEDYRLFFRKNWLRLTW

SEQ ID NO: 3333 - protein, 20 aa, Artificial Sequence
  Description of Artificial Sequence: Synthetic peptide
  MOD_RES (5)..(5): phosphoserine
RLYKSEPELFFRKNWLRLTW

SEQ ID NO: 3334 - protein, 20 aa, Artificial Sequence
  Description of Artificial Sequence: Synthetic peptide
  MOD_RES (4)..(4): phosphoserine
RLYSVSYLLFFRKNWLRLTW

SEQ ID NO: 3335 - protein, 22 aa, Artificial Sequence
  Description of Artificial Sequence: Synthetic peptide
  MOD_RES (2)..(2): oxidized methionine
  MOD_RES (4)..(4): phosphoserine
RMISHSELRKLFFRKNWLRLTW

SEQ ID NO: 3336 - protein, 22 aa, Artificial Sequence
  Description of Artificial Sequence: Synthetic peptide
  MOD_RES (4)..(4): phosphoserine
RMISHSELRKLFFRKNWLRLTW

SEQ ID NO: 3337 - protein, 21 aa, Artificial Sequence
  Description of Artificial Sequence: Synthetic peptide
  MOD_RES (4)..(4): phosphoserine
RMISKLEAQVFFRKNWLRLTW

SEQ ID NO: 3338 - protein, 21 aa, Artificial Sequence
  Description of Artificial Sequence: Synthetic peptide
  MOD_RES (2)..(2): oxidized methionine
  MOD_RES (4)..(4): phosphoserine
RMKSPFGSSFFFRKNWLRLTW

SEQ ID NO: 3339 - protein, 21 aa, Artificial Sequence
  Description of Artificial Sequence: Synthetic peptide
  MOD_RES (4)..(4): phosphoserine
RMKSPFGSSFFFRKNWLRLTW

SEQ ID NO: 3340 - protein, 21 aa, Artificial Sequence
  Description of Artificial Sequence: Synthetic peptide
  MOD_RES (2)..(2): oxidized methionine
  MOD_RES (4)..(4): phosphoserine
RMLSLRDQRLFFRKNWLRLTW

SEQ ID NO: 3341 - protein, 20 aa, Artificial Sequence
  Description of Artificial Sequence: Synthetic peptide
  MOD_RES (2)..(2): oxidized methionine
  MOD_RES (4)..(4): phosphoserine
RMYSFDDVLFFRKNWLRLTW

SEQ ID NO: 3342 - protein, 20 aa, Artificial Sequence
  Description of Artificial Sequence: Synthetic peptide
  MOD_RES (4)..(4): phosphoserine
RNASLERVLFFRKNWLRLTW

SEQ ID NO: 3343 - protein, 22 aa, Artificial Sequence
  Description of Artificial Sequence: Synthetic peptide
  MOD_RES (10)..(10): phosphoserine
RPADSAQLLSLFFRKNWLRLTW

SEQ ID NO: 3344 - protein, 22 aa, Artificial Sequence
  Description of Artificial Sequence: Synthetic peptide
  MOD_RES (5)..(5): phosphoserine
RPARSVPSIAAFFRKNWLRLTW

SEQ ID NO: 3345 - protein, 20 aa, Artificial Sequence
  Description of Artificial Sequence: Synthetic peptide
  MOD_RES (4)..(4): phosphoserine
RPASPALLLFFRKNWLRLTW

SEQ ID NO: 3346 - protein, 20 aa, Artificial Sequence
  Description of Artificial Sequence: Synthetic peptide
  MOD_RES (4)..(4): phosphoserine
RPASPLMHIFFRKNWLRLTW

SEQ ID NO: 3347 - protein, 20 aa, Artificial Sequence
  Description of Artificial Sequence: Synthetic peptide
  MOD_RES (6)..(6): phosphoserine
RPASPSLQLFFRKNWLRLTW

SEQ ID NO: 3348 - protein, 26 aa, Artificial Sequence
  Description of Artificial Sequence: Synthetic peptide
  MOD_RES (10)..(10): phosphoserine
RPFHGISTVSLPNSLFFRKNWLRLTW

SEQ ID NO: 3349 - protein, 21 aa, Artificial Sequence
  Description of Artificial Sequence: Synthetic peptide
  MOD_RES (4)..(4): phosphoserine
RPFSKPEIALFFRKNWLRLTW

SEQ ID NO: 3350 - protein, 20 aa, Artificial Sequence
  Description of Artificial Sequence: Synthetic peptide
  MOD_RES (4)..(4): phosphoserine
RPFSREMDLFFRKNWLRLTW

SEQ ID NO: 3351 - protein, 22 aa, Artificial Sequence
  Description of Artificial Sequence: Synthetic peptide
  MOD_RES (10)..(10): phosphoserine
RPHLSGRKLSLFFRKNWLRLTW

SEQ ID NO: 3352 - protein, 20 aa, Artificial Sequence
  Description of Artificial Sequence: Synthetic peptide
  MOD_RES (4)..(4): phosphothreonine
RPHTPTPGIFFRKNWLRLTW

SEQ ID NO: 3353 - protein, 22 aa, Artificial Sequence
  Description of Artificial Sequence: Synthetic peptide
  MOD_RES (4)..(4): phosphothreonine
  MOD_RES (11)..(11): oxidized methionine
RPHTPTPGIYMFFRKNWLRLTW

SEQ ID NO: 3354 - protein, 22 aa, Artificial Sequence
  Description of Artificial Sequence: Synthetic peptide
  MOD_RES (6)..(6): phosphothreonine
RPHTPTPGIYMFFRKNWLRLTW

SEQ ID NO: 3355 - protein, 20 aa, Artificial Sequence
  Description of Artificial Sequence: Synthetic peptide
  MOD_RES (4)..(4): phosphoserine
RPISPRIGAFFRKNWLRLTW

SEQ ID NO: 3356 - protein, 21 aa, Artificial Sequence
  Description of Artificial Sequence: Synthetic peptide
  MOD_RES (4)..(4): phosphoserine
RPISVIGGVSFFRKNWLRLTW

SEQ ID NO: 3357 - protein, 20 aa, Artificial Sequence
  Description of Artificial Sequence: Synthetic peptide
  MOD_RES (4)..(4): phosphothreonine
RPITPVYTVFFRKNWLRLTW

SEQ ID NO: 3358 - protein, 21 aa, Artificial Sequence
  Description of Artificial Sequence: Synthetic peptide
  MOD_RES (4)..(4): phosphothreonine
RPITPVYTVAFFRKNWLRLTW

SEQ ID NO: 3359 - protein, 21 aa, Artificial Sequence
  Description of Artificial Sequence: Synthetic peptide
  MOD_RES (9)..(9): phosphoserine
RPKLHHSLSFFFRKNWLRLTW

SEQ ID NO: 3360 - protein, 21 aa, Artificial Sequence
  Description of Artificial Sequence: Synthetic peptide
  MOD_RES (7)..(7): phosphoserine
RPKPSSSPVIFFRKNWLRLTW

SEQ ID NO: 3361 - protein, 22 aa, Artificial Sequence
  Description of Artificial Sequence: Synthetic peptide
  MOD_RES (6)..(6): phosphoserine
RPKPSSSPVIFFFRKNWLRLTW

SEQ ID NO: 3362 - protein, 22 aa, Artificial Sequence
  Description of Artificial Sequence: Synthetic peptide
  MOD_RES (7)..(7): phosphoserine
RPKPSSSPVIFFFRKNWLRLTW

SEQ ID NO: 3363 - protein, 23 aa, Artificial Sequence
  Description of Artificial Sequence: Synthetic peptide
  MOD_RES (5)..(5): phosphoserine
RPKPSSSPVIFAFFRKNWLRLTW

SEQ ID NO: 3364 - protein, 23 aa, Artificial Sequence
  Description of Artificial Sequence: Synthetic peptide
  MOD_RES (6)..(6): phosphoserine
RPKPSSSPVIFAFFRKNWLRLTW

SEQ ID NO: 3365 - protein, 23 aa, Artificial Sequence
  Description of Artificial Sequence: Synthetic peptide
  MOD_RES (7)..(7): phosphoserine
RPKPSSSPVIFAFFRKNWLRLTW

SEQ ID NO: 3366 - protein, 21 aa, Artificial Sequence
  Description of Artificial Sequence: Synthetic peptide
  MOD_RES (4)..(4): phosphoserine
RPKSTPELAFFFRKNWLRLTW

SEQ ID NO: 3367 - protein, 20 aa, Artificial Sequence
  Description of Artificial Sequence: Synthetic peptide
  MOD_RES (4)..(4): phosphothreonine
RPKTPPPAPFFRKNWLRLTW

SEQ ID NO: 3368 - protein, 20 aa, Artificial Sequence
  Description of Artificial Sequence: Synthetic peptide
  MOD_RES (4)..(4): phosphoserine
RPLSKQLSAFFRKNWLRLTW

SEQ ID NO: 3369 - protein, 21 aa, Artificial Sequence
  Description of Artificial Sequence: Synthetic peptide
  MOD_RES (4)..(4): phosphoserine
RPLSLIQGPPFFRKNWLRLTW

SEQ ID NO: 3370 - protein, 19 aa, Artificial Sequence
  Description of Artificial Sequence: Synthetic peptide
  MOD_RES (4)..(4): phosphoserine
RPLSPFYLFFRKNWLRLTW

SEQ ID NO: 3371 - protein, 21 aa, Artificial Sequence
  Description of Artificial Sequence: Synthetic peptide
  MOD_RES (4)..(4): phosphoserine
RPLSPFYLSAFFRKNWLRLTW

SEQ ID NO: 3372 - protein, 21 aa, Artificial Sequence
  Description of Artificial Sequence: Synthetic peptide
  MOD_RES (4)..(4): phosphoserine
RPLSPGALQLFFRKNWLRLTW

SEQ ID NO: 3373 - protein, 21 aa, Artificial Sequence
  Description of Artificial Sequence: Synthetic peptide
  MOD_RES (4)..(4): phosphoserine
RPLSPILHIVFFRKNWLRLTW

SEQ ID NO: 3374 - protein, 22 aa, Artificial Sequence
  Description of Artificial Sequence: Synthetic peptide
  MOD_RES (4)..(4): phosphoserine
RPLSPKPSSPGFFRKNWLRLTW

SEQ ID NO: 3375 - protein, 25 aa, Artificial Sequence
  Description of Artificial Sequence: Synthetic peptide
  MOD_RES (4)..(4): phosphoserine
RPLSPKPSSPGSVLFFRKNWLRLTW

SEQ ID NO: 3376 - protein, 25 aa, Artificial Sequence
  Description of Artificial Sequence: Synthetic peptide
  MOD_RES (8)..(8): phosphoserine
RPLSPKPSSPGSVLFFRKNWLRLTW

SEQ ID NO: 3377 - protein, 23 aa, Artificial Sequence
  Description of Artificial Sequence: Synthetic peptide
  MOD_RES (4)..(4): phosphoserine
RPLSPTRLQPALFFRKNWLRLTW

SEQ ID NO: 3378 - protein, 20 aa, Artificial Sequence
  Description of Artificial Sequence: Synthetic peptide
  MOD_RES (4)..(4): phosphothreonine
RPLTPRTPAFFRKNWLRLTW

SEQ ID NO: 3379 - protein, 22 aa, Artificial Sequence
  Description of Artificial Sequence: Synthetic peptide
  MOD_RES (4)..(4): phosphoserine
RPNSLVGITSAFFRKNWLRLTW

SEQ ID NO: 3380 - protein, 21 aa, Artificial Sequence
  Description of Artificial Sequence: Synthetic peptide
  MOD_RES (6)..(6): phosphoserine
RPNSPSPTALFFRKNWLRLTW

SEQ ID NO: 3381 - protein, 21 aa, Artificial Sequence
  Description of Artificial Sequence: Synthetic peptide
  MOD_RES (4)..(4): phosphoserine
RPNSSALETLFFRKNWLRLTW

SEQ ID NO: 3382 - protein, 21 aa, Artificial Sequence
  Description of Artificial Sequence: Synthetic peptide
  MOD_RES (5)..(5): phosphoserine
RPNSSALETLFFRKNWLRLTW

SEQ ID NO: 3383 - protein, 22 aa, Artificial Sequence
  Description of Artificial Sequence: Synthetic peptide
  MOD_RES (4)..(4): phosphoserine
RPPSPGLRGLLFFRKNWLRLTW

SEQ ID NO: 3384 - protein, 24 aa, Artificial Sequence
  Description of Artificial Sequence: Synthetic peptide
  MOD_RES (7)..(7): phosphoserine
RPQESRSLSPSHLFFRKNWLRLTW

SEQ ID NO: 3385 - protein, 24 aa, Artificial Sequence
  Description of Artificial Sequence: Synthetic peptide
  MOD_RES (9)..(9): phosphoserine
RPQESRSLSPSHLFFRKNWLRLTW

SEQ ID NO: 3386 - protein, 22 aa, Artificial Sequence
  Description of Artificial Sequence: Synthetic peptide
  MOD_RES (4)..(4): phosphoserine
RPQSPPAEAVIFFRKNWLRLTW

SEQ ID NO: 3387 - protein, 23 aa, Artificial Sequence
  Description of Artificial Sequence: Synthetic peptide
  MOD_RES (4)..(4): phosphothreonine
RPQTPKEEAQALFFRKNWLRLTW

SEQ ID NO: 3388 - protein, 24 aa, Artificial Sequence
  Description of Artificial Sequence: Synthetic peptide
  MOD_RES (6)..(6): phosphoserine
RPRAFSHSGVHSLFFRKNWLRLTW

SEQ ID NO: 3389 - protein, 22 aa, Artificial Sequence
  Description of Artificial Sequence: Synthetic peptide
  MOD_RES (6)..(6): phosphoserine
RPRAFSIASSLFFRKNWLRLTW

SEQ ID NO: 3390 - protein, 20 aa, Artificial Sequence
  Description of Artificial Sequence: Synthetic peptide
  MOD_RES (6)..(6): phosphothreonine
RPREVTVSLFFRKNWLRLTW

SEQ ID NO: 3391 - protein, 21 aa, Artificial Sequence
  Description of Artificial Sequence: Synthetic peptide
  MOD_RES (6)..(6): phosphoserine
RPRFMSSPVLFFRKNWLRLTW

SEQ ID NO: 3392 - protein, 21 aa, Artificial Sequence
  Description of Artificial Sequence: Synthetic peptide
  MOD_RES (7)..(7): phosphoserine
RPRFMSSPVLFFRKNWLRLTW

SEQ ID NO: 3393 - protein, 22 aa, Artificial Sequence
  Description of Artificial Sequence: Synthetic peptide
  MOD_RES (6)..(6): phosphoserine
  MOD_RES (11)..(11): oxidized methionine
RPRGPSPLVTMFFRKNWLRLTW

SEQ ID NO: 3394 - protein, 22 aa, Artificial Sequence
  Description of Artificial Sequence: Synthetic peptide
  MOD_RES (6)..(6): phosphoserine
RPRGPSPLVTMFFRKNWLRLTW

SEQ ID NO: 3395 - protein, 21 aa, Artificial Sequence
  Description of Artificial Sequence: Synthetic peptide
  MOD_RES (7)..(7): phosphoserine
RPRLQHSFSFFFRKNWLRLTW

SEQ ID NO: 3396 - protein, 21 aa, Artificial Sequence
  Description of Artificial Sequence: Synthetic peptide
  MOD_RES (9)..(9): phosphoserine
RPRLQHSFSFFFRKNWLRLTW

SEQ ID NO: 3397 - protein, 22 aa, Artificial Sequence
  Description of Artificial Sequence: Synthetic peptide
  MOD_RES (6)..(6): phosphoserine
RPRPSSVLRTLFFRKNWLRLTW

SEQ ID NO: 3398 - protein, 26 aa, Artificial Sequence
  Description of Artificial Sequence: Synthetic peptide
  MOD_RES (6)..(6): phosphoserine
RPRPVSPSSLLDTAIFFRKNWLRLTW

SEQ ID NO: 3399 - protein, 21 aa, Artificial Sequence
  Description of Artificial Sequence: Synthetic peptide
  MOD_RES (6)..(6): phosphoserine
RPRSISVEEFFFRKNWLRLTW

SEQ ID NO: 3400 - protein, 23 aa, Artificial Sequence
  Description of Artificial Sequence: Synthetic peptide
  MOD_RES (7)..(7): phosphoserine
RPRSLSSPTVTLFFRKNWLRLTW

SEQ ID NO: 3401 - protein, 21 aa, Artificial Sequence
  Description of Artificial Sequence: Synthetic peptide
  MOD_RES (4)..(4): phosphoserine
  MOD_RES (7)..(7): oxidized methionine
RPRSPNMQDLFFRKNWLRLTW

SEQ ID NO: 3402 - protein, 22 aa, Artificial Sequence
  Description of Artificial Sequence: Synthetic peptide
  MOD_RES (4)..(4): phosphoserine
RPRSPPEPLRVFFRKNWLRLTW

SEQ ID NO: 3403 - protein, 23 aa, Artificial Sequence
  Description of Artificial Sequence: Synthetic peptide
  MOD_RES (6)..(6): phosphothreonine
RPRSPTGPSNSFFFRKNWLRLTW

SEQ ID NO: 3404 - protein, 20 aa, Artificial Sequence
  Description of Artificial Sequence: Synthetic peptide
  MOD_RES (4)..(4): phosphothreonine
RPRTLRTRLFFRKNWLRLTW

SEQ ID NO: 3405 - protein, 20 aa, Artificial Sequence
  Description of Artificial Sequence: Synthetic peptide
  MOD_RES (3)..(3): phosphoserine
  MOD_RES (9)..(9): oxidized methionine
RPSSAPDLMFFRKNWLRLTW

SEQ ID NO: 3406 - protein, 20 aa, Artificial Sequence
  Description of Artificial Sequence: Synthetic peptide
  MOD_RES (3)..(3): phosphoserine
RPSSAPDLMFFRKNWLRLTW

SEQ ID NO: 3407 - protein, 20 aa, Artificial Sequence
  Description of Artificial Sequence: Synthetic peptide
  MOD_RES (4)..(4): phosphoserine
  MOD_RES (9)..(9): oxidized methionine
RPSSAPDLMFFRKNWLRLTW

SEQ ID NO: 3408 - protein, 20 aa, Artificial Sequence
  Description of Artificial Sequence: Synthetic peptide
  MOD_RES (4)..(4): phosphoserine
RPSSAPDLMFFRKNWLRLTW

SEQ ID NO: 3409 - protein, 20 aa, Artificial Sequence
  Description of Artificial Sequence: Synthetic peptide
  MOD_RES (3)..(3): phosphoserine
RPSSGFYELFFRKNWLRLTW

SEQ ID NO: 3410 - protein, 20 aa, Artificial Sequence
  Description of Artificial Sequence: Synthetic peptide
  MOD_RES (3)..(3): phosphoserine
RPSSGQDLFFFRKNWLRLTW

SEQ ID NO: 3411 - protein, 20 aa, Artificial Sequence
  Description of Artificial Sequence: Synthetic peptide
  MOD_RES (4)..(4): phosphoserine
RPSSGQDLFFFRKNWLRLTW

SEQ ID NO: 3412 - protein, 20 aa, Artificial Sequence
  Description of Artificial Sequence: Synthetic peptide
  MOD_RES (4)..(4): phosphoserine
RPSSLRQYLFFRKNWLRLTW

SEQ ID NO: 3413 - protein, 22 aa, Artificial Sequence
  Description of Artificial Sequence: Synthetic peptide
  MOD_RES (4)..(4): phosphoserine
RPSSPLIDIKPFFRKNWLRLTW

SEQ ID NO: 3414 - protein, 21 aa, Artificial Sequence
  Description of Artificial Sequence: Synthetic peptide
  MOD_RES (3)..(3): phosphoserine
RPSSPVHVAFFFRKNWLRLTW

SEQ ID NO: 3415 - protein, 21 aa, Artificial Sequence
  Description of Artificial Sequence: Synthetic peptide
  MOD_RES (4)..(4): phosphoserine
RPSSPVHVAFFFRKNWLRLTW

SEQ ID NO: 3416 - protein, 22 aa, Artificial Sequence
  Description of Artificial Sequence: Synthetic peptide
  MOD_RES (4)..(4): phosphoserine
RPSSPVTVTALFFRKNWLRLTW

SEQ ID NO: 3417 - protein, 22 aa, Artificial Sequence
  Description of Artificial Sequence: Synthetic peptide
  MOD_RES (4)..(4): phosphoserine
  MOD_RES (9)..(9): oxidized methionine
RPSSRVALMVLFFRKNWLRLTW

SEQ ID NO: 3418 - protein, 22 aa, Artificial Sequence
  Description of Artificial Sequence: Synthetic peptide
  MOD_RES (4)..(4): phosphoserine
RPSSRVALMVLFFRKNWLRLTW

SEQ ID NO: 3419 - protein, 21 aa, Artificial Sequence
  Description of Artificial Sequence: Synthetic peptide
  MOD_RES (4)..(4): phosphothreonine
RPSTPHTITLFFRKNWLRLTW

SEQ ID NO: 3420 - protein, 21 aa, Artificial Sequence
  Description of Artificial Sequence: Synthetic peptide
  MOD_RES (3)..(3): phosphoserine
RPSTPTINVLFFRKNWLRLTW

SEQ ID NO: 3421 - protein, 21 aa, Artificial Sequence
  Description of Artificial Sequence: Synthetic peptide
  MOD_RES (4)..(4): phosphothreonine
RPSTPTINVLFFRKNWLRLTW

SEQ ID NO: 3422 - protein, 21 aa, Artificial Sequence
  Description of Artificial Sequence: Synthetic peptide
  MOD_RES (6)..(6): phosphothreonine
RPSTPTINVLFFRKNWLRLTW

SEQ ID NO: 3423 - protein, 20 aa, Artificial Sequence
  Description of Artificial Sequence: Synthetic peptide
  MOD_RES (3)..(3): phosphothreonine
RPTSFADELFFRKNWLRLTW

SEQ ID NO: 3424 - protein, 21 aa, Artificial Sequence
  Description of Artificial Sequence: Synthetic peptide
  MOD_RES (4)..(4): phosphoserine
RPTSISWDGLFFRKNWLRLTW

SEQ ID NO: 3425 - protein, 21 aa, Artificial Sequence
  Description of Artificial Sequence: Synthetic peptide
  MOD_RES (6)..(6): phosphoserine
RPTSISWDGLFFRKNWLRLTW

SEQ ID NO: 3426 - protein, 21 aa, Artificial Sequence
  Description of Artificial Sequence: Synthetic peptide
  MOD_RES (4)..(4): phosphoserine
RPTSPRLLTLFFRKNWLRLTW

SEQ ID NO: 3427 - protein, 21 aa, Artificial Sequence
  Description of Artificial Sequence: Synthetic peptide
  MOD_RES (9)..(9): phosphoserine
RPVDPRRRSLFFRKNWLRLTW

SEQ ID NO: 3428 - protein, 20 aa, Artificial Sequence
  Description of Artificial Sequence: Synthetic peptide
  MOD_RES (4)..(4): phosphoserine
RPVSEMFSLFFRKNWLRLTW

SEQ ID NO: 3429 - protein, 22 aa, Artificial Sequence
  Description of Artificial Sequence: Synthetic peptide
  MOD_RES (4)..(4): phosphoserine
RPVSMDARIQVFFRKNWLRLTW

SEQ ID NO: 3430 - protein, 22 aa, Artificial Sequence
  Description of Artificial Sequence: Synthetic peptide
  MOD_RES (4)..(4): phosphoserine
RPVSPGKDITAFFRKNWLRLTW

SEQ ID NO: 3431 - protein, 21 aa, Artificial Sequence
  Description of Artificial Sequence: Synthetic peptide
  MOD_RES (5)..(5): phosphothreonine
RPVSTDFAQYFFRKNWLRLTW

SEQ ID NO: 3432 - protein, 20 aa, Artificial Sequence
  Description of Artificial Sequence: Synthetic peptide
  MOD_RES (4)..(4): phosphothreonine
RPVTPITNFFFRKNWLRLTW

SEQ ID NO: 3433 - protein, 20 aa, Artificial Sequence
  Description of Artificial Sequence: Synthetic peptide
  MOD_RES (4)..(4): phosphothreonine
RPVTPPRTAFFRKNWLRLTW

SEQ ID NO: 3434 - protein, 20 aa, Artificial Sequence
  Description of Artificial Sequence: Synthetic peptide
  MOD_RES (3)..(3): oxidized tryptophan
  MOD_RES (4)..(4): phosphoserine
RPWSNSRGLFFRKNWLRLTW

SEQ ID NO: 3435 - protein, 20 aa, Artificial Sequence
  Description of Artificial Sequence: Synthetic peptide
  MOD_RES (3)..(3): oxidized tryptophan
  MOD_RES (4)..(4): phosphoserine
RPWSPAVSAFFRKNWLRLTW

SEQ ID NO: 3436 - protein, 21 aa, Artificial Sequence
  Description of Artificial Sequence: Synthetic peptide
  MOD_RES (5)..(5): phosphoserine
RPYPSPGAVLFFRKNWLRLTW

SEQ ID NO: 3437 - protein, 22 aa, Artificial Sequence
  Description of Artificial Sequence: Synthetic peptide
  MOD_RES (4)..(4): phosphoserine
RQASIELPSMAFFRKNWLRLTW

SEQ ID NO: 3438 - protein, 23 aa, Artificial Sequence
  Description of Artificial Sequence: Synthetic peptide
  MOD_RES (4)..(4): phosphoserine
  MOD_RES (10)..(10): oxidized methionine
RQASIELPSMAVFFRKNWLRLTW

SEQ ID NO: 3439 - protein, 24 aa, Artificial Sequence
  Description of Artificial Sequence: Synthetic peptide
  MOD_RES (4)..(4): phosphoserine
  MOD_RES (10)..(10): oxidized methionine
RQASIELPSMAVAFFRKNWLRLTW

SEQ ID NO: 3440 - protein, 26 aa, Artificial Sequence
  Description of Artificial Sequence: Synthetic peptide
  MOD_RES (4)..(4): phosphoserine
  MOD_RES (10)..(10): oxidized methionine
RQASIELPSMAVASTFFRKNWLRLTW

SEQ ID NO: 3441 - protein, 26 aa, Artificial Sequence
  Description of Artificial Sequence: Synthetic peptide
  MOD_RES (4)..(4): phosphoserine
RQASIELPSMAVASTFFRKNWLRLTW

SEQ ID NO: 3442 - protein, 20 aa, Artificial Sequence
  Description of Artificial Sequence: Synthetic peptide
  MOD_RES (6)..(6): phosphoserine
RQASLSISVFFRKNWLRLTW

SEQ ID NO: 3443 - protein, 22 aa, Artificial Sequence
  Description of Artificial Sequence: Synthetic peptide
  MOD_RES (10)..(10): phosphoserine
RQFDEESLESFFFRKNWLRLTW

SEQ ID NO: 3444 - protein, 20 aa, Artificial Sequence
  Description of Artificial Sequence: Synthetic peptide
  MOD_RES (8)..(8): phosphoserine
RQFTSSSSIFFRKNWLRLTW

SEQ ID NO: 3445 - protein, 20 aa, Artificial Sequence
  Description of Artificial Sequence: Synthetic peptide
  MOD_RES (5)..(5): phosphoserine
RQHFSPLSLFFRKNWLRLTW

SEQ ID NO: 3446 - protein, 22 aa, Artificial Sequence
  Description of Artificial Sequence: Synthetic peptide
  MOD_RES (6)..(6): phosphoserine
  MOD_RES (9)..(9): oxidized tryptophan
RQIQPSPPWSYFFRKNWLRLTW

SEQ ID NO: 3447 - protein, 22 aa, Artificial Sequence
  Description of Artificial Sequence: Synthetic peptide
  MOD_RES (6)..(6): phosphoserine
RQIQPSPPWSYFFRKNWLRLTW

SEQ ID NO: 3448 - protein, 22 aa, Artificial Sequence
  Description of Artificial Sequence: Synthetic peptide
  MOD_RES (4)..(4): phosphoserine
RQISIRGIVGVFFRKNWLRLTW

SEQ ID NO: 3449 - protein, 21 aa, Artificial Sequence
  Description of Artificial Sequence: Synthetic peptide
  MOD_RES (4)..(4): phosphoserine
RQISISEPQAFFRKNWLRLTW

SEQ ID NO: 3450 - protein, 22 aa, Artificial Sequence
  Description of Artificial Sequence: Synthetic peptide
  MOD_RES (4)..(4): phosphoserine
RQISISEPQAFFFRKNWLRLTW

SEQ ID NO: 3451 - protein, 23 aa, Artificial Sequence
  Description of Artificial Sequence: Synthetic peptide
  MOD_RES (4)..(4): phosphoserine
RQISISEPQAFLFFRKNWLRLTW

SEQ ID NO: 3452 - protein, 24 aa, Artificial Sequence
  Description of Artificial Sequence: Synthetic peptide
  MOD_RES (4)..(4): phosphoserine
RQISISEPQAFLFFFRKNWLRLTW

SEQ ID NO: 3453 - protein, 21 aa, Artificial Sequence
  Description of Artificial Sequence: Synthetic peptide
  MOD_RES (4)..(4): phosphoserine
RQISPEEFEYFFRKNWLRLTW

SEQ ID NO: 3454 - protein, 21 aa, Artificial Sequence
  Description of Artificial Sequence: Synthetic peptide
  MOD_RES (4)..(4): phosphoserine
RQKSPLFQFAFFRKNWLRLTW

SEQ ID NO: 3455 - protein, 20 aa, Artificial Sequence
  Description of Artificial Sequence: Synthetic peptide
  MOD_RES (4)..(4): phosphoserine
RQPSEEEIIFFRKNWLRLTW

SEQ ID NO: 3456 - protein, 22 aa, Artificial Sequence
  Description of Artificial Sequence: Synthetic peptide
  MOD_RES (4)..(4): phosphoserine
RQPSEEEIIKLFFRKNWLRLTW

SEQ ID NO: 3457 - protein, 21 aa, Artificial Sequence
  Description of Artificial Sequence: Synthetic peptide
  MOD_RES (4)..(4): phosphoserine
RQPSWDPSPVFFRKNWLRLTW

SEQ ID NO: 3458 - protein, 24 aa, Artificial Sequence
  Description of Artificial Sequence: Synthetic peptide
  MOD_RES (6)..(6): phosphoserine
RQRSLSTSGESLYFFRKNWLRLTW

SEQ ID NO: 3459 - protein, 23 aa, Artificial Sequence
  Description of Artificial Sequence: Synthetic peptide
  MOD_RES (4)..(4): phosphoserine
RQVSEDPDIDSLFFRKNWLRLTW

SEQ ID NO: 3460 - protein, 21 aa, Artificial Sequence
  Description of Artificial Sequence: Synthetic peptide
  MOD_RES (4)..(4): phosphoserine
RRASLSDIGFFFRKNWLRLTW

SEQ ID NO: 3461 - protein, 22 aa, Artificial Sequence
  Description of Artificial Sequence: Synthetic peptide
  MOD_RES (7)..(7): phosphoserine
RRFRFPSGAELFFRKNWLRLTW

SEQ ID NO: 3462 - protein, 20 aa, Artificial Sequence
  Description of Artificial Sequence: Synthetic peptide
  MOD_RES (4)..(4): phosphoserine
RRFSDFLGLFFRKNWLRLTW

SEQ ID NO: 3463 - protein, 21 aa, Artificial Sequence
  Description of Artificial Sequence: Synthetic peptide
  MOD_RES (6)..(6): phosphoserine
RRFSFSGNTLFFRKNWLRLTW

SEQ ID NO: 3464 - protein, 19 aa, Artificial Sequence
  Description of Artificial Sequence: Synthetic peptide
  MOD_RES (4)..(4): phosphoserine
RRFSGLLNFFRKNWLRLTW

SEQ ID NO: 3465 - protein, 20 aa, Artificial Sequence
  Description of Artificial Sequence: Synthetic peptide
  MOD_RES (4)..(4): phosphoserine
  MOD_RES (9)..(9): cysteinylated cysteine
RRFSGLLNCFFRKNWLRLTW

SEQ ID NO: 3466 - protein, 20 aa, Artificial Sequence
  Description of Artificial Sequence: Synthetic peptide
  MOD_RES (4)..(4): phosphoserine
RRFSGLLNCFFRKNWLRLTW

SEQ ID NO: 3467 - protein, 21 aa, Artificial Sequence
  Description of Artificial Sequence: Synthetic peptide
  MOD_RES (4)..(4): phosphoserine
RRFSGLSAELFFRKNWLRLTW

SEQ ID NO: 3468 - protein, 20 aa, Artificial Sequence
  Description of Artificial Sequence: Synthetic peptide
  MOD_RES (4)..(4): phosphoserine
RRFSLDTDYFFRKNWLRLTW

SEQ ID NO: 3469 - protein, 21 aa, Artificial Sequence
  Description of Artificial Sequence: Synthetic peptide
  MOD_RES (4)..(4): phosphoserine
RRFSPPRRMLFFRKNWLRLTW

SEQ ID NO: 3470 - protein, 20 aa, Artificial Sequence
  Description of Artificial Sequence: Synthetic peptide
  MOD_RES (4)..(4): phosphoserine
RRFSVTLRLFFRKNWLRLTW

SEQ ID NO: 3471 - protein, 20 aa, Artificial Sequence
  Description of Artificial Sequence: Synthetic peptide
  MOD_RES (4)..(4): phosphothreonine
RRFTEIYEFFFRKNWLRLTW

SEQ ID NO: 3472 - protein, 21 aa, Artificial Sequence
  Description of Artificial Sequence: Synthetic peptide
  MOD_RES (4)..(4): phosphothreonine
RRFTPPSTALFFRKNWLRLTW

SEQ ID NO: 3473 - protein, 18 aa, Artificial Sequence
  Description of Artificial Sequence: Synthetic peptide
  MOD_RES (4)..(4): phosphoserine
RRGSFDAFFRKNWLRLTW

SEQ ID NO: 3474 - protein, 19 aa, Artificial Sequence
  Description of Artificial Sequence: Synthetic peptide
  MOD_RES (4)..(4): phosphoserine
RRGSFDATFFRKNWLRLTW

SEQ ID NO: 3475 - protein, 20 aa, Artificial Sequence
  Description of Artificial Sequence: Synthetic peptide
  MOD_RES (4)..(4): phosphoserine
RRGSFDATGFFRKNWLRLTW

SEQ ID NO: 3476 - protein, 22 aa, Artificial Sequence
  Description of Artificial Sequence: Synthetic peptide
  MOD_RES (4)..(4): phosphoserine
RRGSFDATGSGFFRKNWLRLTW

SEQ ID NO: 3477 - protein, 23 aa, Artificial Sequence
  Description of Artificial Sequence: Synthetic peptide
  MOD_RES (4)..(4): phosphoserine
RRGSFDATGSGFFFRKNWLRLTW

SEQ ID NO: 3478 - protein, 25 aa, Artificial Sequence
  Description of Artificial Sequence: Synthetic peptide
  MOD_RES (4)..(4): phosphoserine
RRGSFDATGSGFSMFFRKNWLRLTW

SEQ ID NO: 3479 - protein, 27 aa, Artificial Sequence
  Description of Artificial Sequence: Synthetic peptide
  MOD_RES (4)..(4): phosphoserine
  MOD_RES (14)..(14): oxidized methionine
RRGSFDATGSGFSMTFFFRKNWLRLTW

SEQ ID NO: 3480 - protein, 27 aa, Artificial Sequence
  Description of Artificial Sequence: Synthetic peptide
  MOD_RES (4)..(4): phosphoserine
RRGSFDATGSGFSMTFFFRKNWLRLTW

SEQ ID NO: 3481 - protein, 21 aa, Artificial Sequence
  Description of Artificial Sequence: Synthetic peptide
  MOD_RES (4)..(4): phosphoserine
RRGSFEVTLLFFRKNWLRLTW

SEQ ID NO: 3482 - protein, 22 aa, Artificial Sequence
  Description of Artificial Sequence: Synthetic peptide
  MOD_RES (4)..(4): phosphoserine
RRGSGPEIFTFFFRKNWLRLTW

SEQ ID NO: 3483 - protein, 21 aa, Artificial Sequence
  Description of Artificial Sequence: Synthetic peptide
  MOD_RES (4)..(4): phosphoserine
RRGSPEMPFYFFRKNWLRLTW

SEQ ID NO: 3484 - protein, 23 aa, Artificial Sequence
  Description of Artificial Sequence: Synthetic peptide
  MOD_RES (6)..(6): phosphoserine
RRIDISPSTFRKFFRKNWLRLTW

SEQ ID NO: 3485 - protein, 23 aa, Artificial Sequence
  Description of Artificial Sequence: Synthetic peptide
  MOD_RES (8)..(8): phosphoserine
RRIDISPSTLRKFFRKNWLRLTW

SEQ ID NO: 3486 - protein, 20 aa, Artificial Sequence
  Description of Artificial Sequence: Synthetic peptide
  MOD_RES (6)..(6): phosphothreonine
RRISLTKRLFFRKNWLRLTW

SEQ ID NO: 3487 - protein, 20 aa, Artificial Sequence
  Description of Artificial Sequence: Synthetic peptide
  MOD_RES (7)..(7): oxidized tryptophan
  MOD_RES (8)..(8): phosphothreonine
RRLDRRWTLFFRKNWLRLTW

SEQ ID NO: 3488 - protein, 20 aa, Artificial Sequence
  Description of Artificial Sequence: Synthetic peptide
  MOD_RES (8)..(8): phosphothreonine
RRLDRRWTLFFRKNWLRLTW

SEQ ID NO: 3489 - protein, 21 aa, Artificial Sequence
  Description of Artificial Sequence: Synthetic peptide
  MOD_RES (4)..(4): phosphoserine
RRLSFQAEYWFFRKNWLRLTW

SEQ ID NO: 3490 - protein, 20 aa, Artificial Sequence
  Description of Artificial Sequence: Synthetic peptide
  MOD_RES (4)..(4): phosphoserine
RRLSLFLVLFFRKNWLRLTW

SEQ ID NO: 3491 - protein, 21 aa, Artificial Sequence
  Description of Artificial Sequence: Synthetic peptide
  MOD_RES (4)..(4): phosphoserine
RRLSVLVDDYFFRKNWLRLTW

SEQ ID NO: 3492 - protein, 21 aa, Artificial Sequence
  Description of Artificial Sequence: Synthetic peptide
  MOD_RES (4)..(4): phosphoserine
RRMSVGDRAGFFRKNWLRLTW

SEQ ID NO: 3493 - protein, 26 aa, Artificial Sequence
  Description of Artificial Sequence: Synthetic peptide
  MOD_RES (4)..(4): phosphoserine
RRMSVGDRAGSLPNYFFRKNWLRLTW

SEQ ID NO: 3494 - protein, 20 aa, Artificial Sequence
  Description of Artificial Sequence: Synthetic peptide
  MOD_RES (4)..(4): phosphoserine
RRNSLRIIFFFRKNWLRLTW

SEQ ID NO: 3495 - protein, 22 aa, Artificial Sequence
  Description of Artificial Sequence: Synthetic peptide
  MOD_RES (4)..(4): phosphoserine
RRPSQNAISFFFFRKNWLRLTW

SEQ ID NO: 3496 - protein, 20 aa, Artificial Sequence
  Description of Artificial Sequence: Synthetic peptide
  MOD_RES (4)..(4): phosphothreonine
RRPTLTTFFFFRKNWLRLTW

SEQ ID NO: 3497 - protein, 20 aa, Artificial Sequence
  Description of Artificial Sequence: Synthetic peptide
  MOD_RES (3)..(3): phosphoserine
RRSDSLLSFFFRKNWLRLTW

SEQ ID NO: 3498 - protein, 20 aa, Artificial Sequence
  Description of Artificial Sequence: Synthetic peptide
  MOD_RES (5)..(5): phosphoserine
RRSDSLLSFFFRKNWLRLTW

SEQ ID NO: 3499 - protein, 20 aa, Artificial Sequence
  Description of Artificial Sequence: Synthetic peptide
  MOD_RES (6)..(6): phosphoserine
RRSIISPNFFFRKNWLRLTW

SEQ ID NO: 3500 - protein, 24 aa, Artificial Sequence
  Description of Artificial Sequence: Synthetic peptide
  MOD_RES (3)..(3): phosphoserine
RRSSFSMEEGDVLFFRKNWLRLTW

SEQ ID NO: 3501 - protein, 24 aa, Artificial Sequence
  Description of Artificial Sequence: Synthetic peptide
  MOD_RES (4)..(4): phosphoserine
RRSSFSMEEGDVLFFRKNWLRLTW

SEQ ID NO: 3502 - protein, 20 aa, Artificial Sequence
  Description of Artificial Sequence: Synthetic peptide
  MOD_RES (3)..(3): phosphoserine
RRSSIPITVFFRKNWLRLTW

SEQ ID NO: 3503 - protein, 20 aa, Artificial Sequence
  Description of Artificial Sequence: Synthetic peptide
  MOD_RES (4)..(4): phosphoserine
RRSSISSWLFFRKNWLRLTW

SEQ ID NO: 3504 - protein, 20 aa, Artificial Sequence
  Description of Artificial Sequence: Synthetic peptide
  MOD_RES (3)..(3): phosphoserine
  MOD_RES (9)..(9): oxidized methionine
RRSSLLSLMFFRKNWLRLTW

SEQ ID NO: 3505 - protein, 20 aa, Artificial Sequence
  Description of Artificial Sequence: Synthetic peptide
  MOD_RES (3)..(3): phosphoserine
RRSSLLSLMFFRKNWLRLTW

SEQ ID NO: 3506 - protein, 20 aa, Artificial Sequence
  Description of Artificial Sequence: Synthetic peptide
  MOD_RES (4)..(4): phosphoserine
  MOD_RES (9)..(9): oxidized methionine
RRSSLLSLMFFRKNWLRLTW

SEQ ID NO: 3507 - protein, 20 aa, Artificial Sequence
  Description of Artificial Sequence: Synthetic peptide
  MOD_RES (3)..(3): phosphoserine
RRSSYLLAIFFRKNWLRLTW

SEQ ID NO: 3508 - protein, 20 aa, Artificial Sequence
  Description of Artificial Sequence: Synthetic peptide
  MOD_RES (4)..(4): phosphoserine
RRSSYLLAIFFRKNWLRLTW

SEQ ID NO: 3509 - protein, 20 aa, Artificial Sequence
  Description of Artificial Sequence: Synthetic peptide
  MOD_RES (3)..(3): phosphoserine
RRSTGVSFWFFRKNWLRLTW

SEQ ID NO: 3510 - protein, 20 aa, Artificial Sequence
  Description of Artificial Sequence: Synthetic peptide
  MOD_RES (4)..(4): phosphothreonine
RRSTGVSFWFFRKNWLRLTW

SEQ ID NO: 3511 - protein, 20 aa, Artificial Sequence
  Description of Artificial Sequence: Synthetic peptide
  MOD_RES (4)..(4): phosphoserine
RRTSIHDFLFFRKNWLRLTW

SEQ ID NO: 3512 - protein, 21 aa, Artificial Sequence
  Description of Artificial Sequence: Synthetic peptide
  MOD_RES (4)..(4): phosphoserine
RRVSLSEIGFFFRKNWLRLTW

SEQ ID NO: 3513 - protein, 22 aa, Artificial Sequence
  Description of Artificial Sequence: Synthetic peptide
  MOD_RES (4)..(4): phosphoserine
RRVSSNGIFDLFFRKNWLRLTW

SEQ ID NO: 3514 - protein, 22 aa, Artificial Sequence
  Description of Artificial Sequence: Synthetic peptide
  MOD_RES (5)..(5): phosphoserine
RRVSSNGIFDLFFRKNWLRLTW

SEQ ID NO: 3515 - protein, 20 aa, Artificial Sequence
  Description of Artificial Sequence: Synthetic peptide
  MOD_RES (4)..(4): phosphoserine
RRYSDFAKLFFRKNWLRLTW

SEQ ID NO: 3516 - protein, 20 aa, Artificial Sequence
  Description of Artificial Sequence: Synthetic peptide
  MOD_RES (6)..(6): phosphoserine
RSELLSFIKFFRKNWLRLTW

SEQ ID NO: 3517 - protein, 24 aa, Artificial Sequence
  Description of Artificial Sequence: Synthetic peptide
  MOD_RES (4)..(4): phosphoserine
RSFSADNFIGIQRFFRKNWLRLTW

SEQ ID NO: 3518 - protein, 20 aa, Artificial Sequence
  Description of Artificial Sequence: Synthetic peptide
  MOD_RES (4)..(4): phosphoserine
RSFSGLIKRFFRKNWLRLTW

SEQ ID NO: 3519 - protein, 22 aa, Artificial Sequence
  Description of Artificial Sequence: Synthetic peptide
  MOD_RES (4)..(4): phosphoserine
RSFSMHDLTTIFFRKNWLRLTW

SEQ ID NO: 3520 - protein, 22 aa, Artificial Sequence
  Description of Artificial Sequence: Synthetic peptide
  MOD_RES (4)..(4): phosphoserine
RSFSPKSPLELFFRKNWLRLTW

SEQ ID NO: 3521 - protein, 20 aa, Artificial Sequence
  Description of Artificial Sequence: Synthetic peptide
  MOD_RES (4)..(4): phosphoserine
  MOD_RES (7)..(7): oxidized methionine
RSFSPTMKVFFRKNWLRLTW

SEQ ID NO: 3522 - protein, 20 aa, Artificial Sequence
  Description of Artificial Sequence: Synthetic peptide
  MOD_RES (6)..(6): phosphothreonine
RSFSPTMKVFFRKNWLRLTW

SEQ ID NO: 3523 - protein, 19 aa, Artificial Sequence
  Description of Artificial Sequence: Synthetic peptide
  MOD_RES (4)..(4): phosphothreonine
RSFTPLSIFFRKNWLRLTW

SEQ ID NO: 3524 - protein, 21 aa, Artificial Sequence
  Description of Artificial Sequence: Synthetic peptide
  MOD_RES (4)..(4): phosphothreonine
RSFTPLSILKFFRKNWLRLTW

SEQ ID NO: 3525 - protein, 20 aa, Artificial Sequence
  Description of Artificial Sequence: Synthetic peptide
  MOD_RES (4)..(4): phosphoserine
RSHSPPLKLFFRKNWLRLTW

SEQ ID NO: 3526 - protein, 21 aa, Artificial Sequence
  Description of Artificial Sequence: Synthetic peptide
  MOD_RES (6)..(6): phosphoserine
RSIRDSGYIDFFRKNWLRLTW

SEQ ID NO: 3527 - protein, 23 aa, Artificial Sequence
  Description of Artificial Sequence: Synthetic peptide
  MOD_RES (6)..(6): phosphoserine
  MOD_RES (11)..(11): cysteinylated cysteine
  MOD_RES (12)..(12): oxidized tryptophan
RSIRDSGYIDCWFFRKNWLRLTW

SEQ ID NO: 3528 - protein, 23 aa, Artificial Sequence
  Description of Artificial Sequence: Synthetic peptide
  MOD_RES (6)..(6): phosphoserine
  MOD_RES (11)..(11): cysteinylated cysteine
RSIRDSGYIDCWFFRKNWLRLTW

SEQ ID NO: 3529 - protein, 21 aa, Artificial Sequence
  Description of Artificial Sequence: Synthetic peptide
  MOD_RES (6)..(6): phosphoserine
RSISASDLTFFFRKNWLRLTW

SEQ ID NO: 3530 - protein, 21 aa, Artificial Sequence
  Description of Artificial Sequence: Synthetic peptide
  MOD_RES (4)..(4): phosphoserine
RSISNEGLTLFFRKNWLRLTW

SEQ ID NO: 3531 - protein, 19 aa, Artificial Sequence
  Description of Artificial Sequence: Synthetic peptide
  MOD_RES (4)..(4): phosphoserine
RSISPLLFFFRKNWLRLTW

SEQ ID NO: 3532 - protein, 20 aa, Artificial Sequence
  Description of Artificial Sequence: Synthetic peptide
  MOD_RES (4)..(4): phosphoserine
RSISPWLARFFRKNWLRLTW

SEQ ID NO: 3533 - protein, 22 aa, Artificial Sequence
  Description of Artificial Sequence: Synthetic peptide
  MOD_RES (4)..(4): phosphoserine
RSISQSSTDSYFFRKNWLRLTW

SEQ ID NO: 3534 - protein, 20 aa, Artificial Sequence
  Description of Artificial Sequence: Synthetic peptide
  MOD_RES (4)..(4): phosphoserine
RSISSLLRFFFRKNWLRLTW

SEQ ID NO: 3535 - protein, 20 aa, Artificial Sequence
  Description of Artificial Sequence: Synthetic peptide
  MOD_RES (4)..(4): phosphoserine
  MOD_RES (8)..(8): cysteinylated cysteine
RSISTPTCLFFRKNWLRLTW

SEQ ID NO: 3536 - protein, 20 aa, Artificial Sequence
  Description of Artificial Sequence: Synthetic peptide
  MOD_RES (4)..(4): phosphoserine
RSKSVIEQVFFRKNWLRLTW

SEQ ID NO: 3537 - protein, 22 aa, Artificial Sequence
  Description of Artificial Sequence: Synthetic peptide
  MOD_RES (4)..(4): phosphoserine
RSKSVIEQVSWFFRKNWLRLTW

SEQ ID NO: 3538 - protein, 20 aa, Artificial Sequence
  Description of Artificial Sequence: Synthetic peptide
  MOD_RES (4)..(4): phosphoserine
RSLSFSDEMFFRKNWLRLTW

SEQ ID NO: 3539 - protein, 20 aa, Artificial Sequence
  Description of Artificial Sequence: Synthetic peptide
  MOD_RES (4)..(4): phosphoserine
RSLSPFRRHFFRKNWLRLTW

SEQ ID NO: 3540 - protein, 23 aa, Artificial Sequence
  Description of Artificial Sequence: Synthetic peptide
  MOD_RES (4)..(4): phosphoserine
RSLSPIIGKDVLFFRKNWLRLTW

SEQ ID NO: 3541 - protein, 21 aa, Artificial Sequence
  Description of Artificial Sequence: Synthetic peptide
  MOD_RES (4)..(4): phosphoserine
RSLSPILPGRFFRKNWLRLTW

SEQ ID NO: 3542 - protein, 20 aa, Artificial Sequence
  Description of Artificial Sequence: Synthetic peptide
  MOD_RES (4)..(4): phosphoserine
  MOD_RES (6)..(6): oxidized methionine
RSLSPMSGLFFRKNWLRLTW

SEQ ID NO: 3543 - protein, 20 aa, Artificial Sequence
  Description of Artificial Sequence: Synthetic peptide
  MOD_RES (4)..(4): phosphoserine
RSLSPMSGLFFRKNWLRLTW

SEQ ID NO: 3544 - protein, 22 aa, Artificial Sequence
  Description of Artificial Sequence: Synthetic peptide
  MOD_RES (4)..(4): phosphoserine
RSLSPSSNSAFFFRKNWLRLTW

SEQ ID NO: 3545 - protein, 21 aa, Artificial Sequence
  Description of Artificial Sequence: Synthetic peptide
  MOD_RES (2)..(2): phosphoserine
RSLSQELVGVFFRKNWLRLTW

SEQ ID NO: 3546 - protein, 20 aa, Artificial Sequence
  Description of Artificial Sequence: Synthetic peptide
  MOD_RES (2)..(2): phosphoserine
RSLSVEIVYFFRKNWLRLTW

SEQ ID NO: 3547 - protein, 20 aa, Artificial Sequence
  Description of Artificial Sequence: Synthetic peptide
  MOD_RES (4)..(4): phosphoserine
RSLSVGSEFFFRKNWLRLTW

SEQ ID NO: 3548 - protein, 20 aa, Artificial Sequence
  Description of Artificial Sequence: Synthetic peptide
  MOD_RES (4)..(4): phosphoserine
RSLSVPVDLFFRKNWLRLTW

SEQ ID NO: 3549 - protein, 23 aa, Artificial Sequence
  Description of Artificial Sequence: Synthetic peptide
  MOD_RES (4)..(4): phosphoserine
RSLSVPVDLSRWFFRKNWLRLTW

SEQ ID NO: 3550 - protein, 20 aa, Artificial Sequence
  Description of Artificial Sequence: Synthetic peptide
  MOD_RES (4)..(4): phosphothreonine
RSLTHPPTIFFRKNWLRLTW

SEQ ID NO: 3551 - protein, 20 aa, Artificial Sequence
  Description of Artificial Sequence: Synthetic peptide
  MOD_RES (3)..(3): oxidized methionine
  MOD_RES (8)..(8): phosphothreonine
RSMDSVLTLFFRKNWLRLTW

SEQ ID NO: 3552 - protein, 20 aa, Artificial Sequence
  Description of Artificial Sequence: Synthetic peptide
  MOD_RES (8)..(8): phosphothreonine
RSMDSVLTLFFRKNWLRLTW

SEQ ID NO: 3553 - protein, 20 aa, Artificial Sequence
  Description of Artificial Sequence: Synthetic peptide
  MOD_RES (4)..(4): phosphoserine
RSNSPLPSIFFRKNWLRLTW

SEQ ID NO: 3554 - protein, 21 aa, Artificial Sequence
  Description of Artificial Sequence: Synthetic peptide
  MOD_RES (4)..(4): phosphoserine
RSPSFGEDYYFFRKNWLRLTW

SEQ ID NO: 3555 - protein, 20 aa, Artificial Sequence
  Description of Artificial Sequence: Synthetic peptide
  MOD_RES (4)..(4): phosphoserine
RSPSQDFSFFFRKNWLRLTW

SEQ ID NO: 3556 - protein, 20 aa, Artificial Sequence
  Description of Artificial Sequence: Synthetic peptide
  MOD_RES (4)..(4): phosphoserine
RSQSLPNSLFFRKNWLRLTW

SEQ ID NO: 3557 - protein, 21 aa, Artificial Sequence
  Description of Artificial Sequence: Synthetic peptide
  MOD_RES (4)..(4): phosphoserine
RSRSAPPNLWFFRKNWLRLTW

SEQ ID NO: 3558 - protein, 20 aa, Artificial Sequence
  Description of Artificial Sequence: Synthetic peptide
  MOD_RES (4)..(4): phosphoserine
RSRSFDYNYFFRKNWLRLTW

SEQ ID NO: 3559 - protein, 21 aa, Artificial Sequence
  Description of Artificial Sequence: Synthetic peptide
  MOD_RES (4)..(4): phosphoserine
RSRSFDYNYRFFRKNWLRLTW

SEQ ID NO: 3560 - protein, 22 aa, Artificial Sequence
  Description of Artificial Sequence: Synthetic peptide
  MOD_RES (4)..(4): phosphoserine
RSRSFSGLIKRFFRKNWLRLTW

SEQ ID NO: 3561 - protein, 22 aa, Artificial Sequence
  Description of Artificial Sequence: Synthetic peptide
  MOD_RES (6)..(6): phosphoserine
RSRSFSGLIKRFFRKNWLRLTW

SEQ ID NO: 3562 - protein, 21 aa, Artificial Sequence
  Description of Artificial Sequence: Synthetic peptide
  MOD_RES (4)..(4): phosphoserine
RSRSPFSTTRFFRKNWLRLTW

SEQ ID NO: 3563 - protein, 24 aa, Artificial Sequence
  Description of Artificial Sequence: Synthetic peptide
  MOD_RES (4)..(4): phosphoserine
RSRSPLELEPEAKFFRKNWLRLTW

SEQ ID NO: 3564 - protein, 21 aa, Artificial Sequence
  Description of Artificial Sequence: Synthetic peptide
  MOD_RES (4)..(4): phosphoserine
RSRSPLGFYVFFRKNWLRLTW

SEQ ID NO: 3565 - protein, 20 aa, Artificial Sequence
  Description of Artificial Sequence: Synthetic peptide
  MOD_RES (4)..(4): phosphoserine
RSRSPLLKFFFRKNWLRLTW

SEQ ID NO: 3566 - protein, 23 aa, Artificial Sequence
  Description of Artificial Sequence: Synthetic peptide
  MOD_RES (4)..(4): phosphoserine
RSRSPSDSAAYFFFRKNWLRLTW

SEQ ID NO: 3567 - protein, 20 aa, Artificial Sequence
  Description of Artificial Sequence: Synthetic peptide
  MOD_RES (4)..(4): phosphoserine
RSRSVPVSFFFRKNWLRLTW

SEQ ID NO: 3568 - protein, 21 aa, Artificial Sequence
  Description of Artificial Sequence: Synthetic peptide
  MOD_RES (4)..(4): phosphoserine
RSSSFKDFAKFFRKNWLRLTW

SEQ ID NO: 3569 - protein, 20 aa, Artificial Sequence
  Description of Artificial Sequence: Synthetic peptide
  MOD_RES (4)..(4): phosphoserine
RSSSFSDTLFFRKNWLRLTW

SEQ ID NO: 3570 - protein, 20 aa, Artificial Sequence
  Description of Artificial Sequence: Synthetic peptide
  MOD_RES (3)..(3): phosphoserine
RSSSFVLPKFFRKNWLRLTW

SEQ ID NO: 3571 - protein, 20 aa, Artificial Sequence
  Description of Artificial Sequence: Synthetic peptide
  MOD_RES (4)..(4): phosphoserine
RSSSFVLPKFFRKNWLRLTW

SEQ ID NO: 3572 - protein, 21 aa, Artificial Sequence
  Description of Artificial Sequence: Synthetic peptide
  MOD_RES (2)..(2): phosphoserine
RSSSFVLPKLFFRKNWLRLTW

SEQ ID NO: 3573 - protein, 21 aa, Artificial Sequence
  Description of Artificial Sequence: Synthetic peptide
  MOD_RES (3)..(3): phosphoserine
RSSSFVLPKLFFRKNWLRLTW

SEQ ID NO: 3574 - protein, 21 aa, Artificial Sequence
  Description of Artificial Sequence: Synthetic peptide
  MOD_RES (4)..(4): phosphoserine
RSSSFVLPKLFFRKNWLRLTW

SEQ ID NO: 3575 - protein, 21 aa, Artificial Sequence
  Description of Artificial Sequence: Synthetic peptide
  MOD_RES (2)..(2): phosphoserine
  MOD_RES (10)..(10): oxidized tryptophan
RSSSLSDFSWFFRKNWLRLTW

SEQ ID NO: 3576 - protein, 21 aa, Artificial Sequence
  Description of Artificial Sequence: Synthetic peptide
  MOD_RES (2)..(2): phosphoserine
RSSSLSDFSWFFRKNWLRLTW

SEQ ID NO: 3577 - protein, 21 aa, Artificial Sequence
  Description of Artificial Sequence: Synthetic peptide
  MOD_RES (3)..(3): phosphoserine
  MOD_RES (10)..(10): oxidized tryptophan
RSSSLSDFSWFFRKNWLRLTW

SEQ ID NO: 3578 - protein, 21 aa, Artificial Sequence
  Description of Artificial Sequence: Synthetic peptide
  MOD_RES (3)..(3): phosphoserine
RSSSLSDFSWFFRKNWLRLTW

SEQ ID NO: 3579 - protein, 21 aa, Artificial Sequence
  Description of Artificial Sequence: Synthetic peptide
  MOD_RES (4)..(4): phosphoserine
  MOD_RES (10)..(10): oxidized tryptophan
RSSSLSDFSWFFRKNWLRLTW

SEQ ID NO: 3580 - protein, 21 aa, Artificial Sequence
  Description of Artificial Sequence: Synthetic peptide
  MOD_RES (4)..(4): phosphoserine
RSSSLSDFSWFFRKNWLRLTW

SEQ ID NO: 3581 - protein, 20 aa, Artificial Sequence
  Description of Artificial Sequence: Synthetic peptide
  MOD_RES (2)..(2): phosphoserine
RSSSPFLSKFFRKNWLRLTW

SEQ ID NO: 3582 - protein, 20 aa, Artificial Sequence
  Description of Artificial Sequence: Synthetic peptide
  MOD_RES (3)..(3): phosphoserine
RSSSPFLSKFFRKNWLRLTW

SEQ ID NO: 3583 - protein, 21 aa, Artificial Sequence
  Description of Artificial Sequence: Synthetic peptide
  MOD_RES (4)..(4): phosphoserine
RSSSPPILTKFFRKNWLRLTW

SEQ ID NO: 3584 - protein, 22 aa, Artificial Sequence
  Description of Artificial Sequence: Synthetic peptide
  MOD_RES (3)..(3): phosphoserine
RSSSTELLSHYFFRKNWLRLTW

SEQ ID NO: 3585 - protein, 22 aa, Artificial Sequence
  Description of Artificial Sequence: Synthetic peptide
  MOD_RES (4)..(4): phosphoserine
RSSSTELLSHYFFRKNWLRLTW

SEQ ID NO: 3586 - protein, 20 aa, Artificial Sequence
  Description of Artificial Sequence: Synthetic peptide
  MOD_RES (4)..(4): phosphoserine
RSSSWGRTYFFRKNWLRLTW

SEQ ID NO: 3587 - protein, 20 aa, Artificial Sequence
  Description of Artificial Sequence: Synthetic peptide
  MOD_RES (4)..(4): phosphothreonine
RSSTPLPTIFFRKNWLRLTW

SEQ ID NO: 3588 - protein, 20 aa, Artificial Sequence
  Description of Artificial Sequence: Synthetic peptide
  MOD_RES (2)..(2): phosphoserine
RSTSLSLKYFFRKNWLRLTW

SEQ ID NO: 3589 - protein, 20 aa, Artificial Sequence
  Description of Artificial Sequence: Synthetic peptide
  MOD_RES (3)..(3): phosphothreonine
RSTSLSLKYFFRKNWLRLTW

SEQ ID NO: 3590 - protein, 20 aa, Artificial Sequence
  Description of Artificial Sequence: Synthetic peptide
  MOD_RES (4)..(4): phosphoserine
RSTSLSLKYFFRKNWLRLTW

SEQ ID NO: 3591 - protein, 22 aa, Artificial Sequence
  Description of Artificial Sequence: Synthetic peptide
  MOD_RES (4)..(4): phosphoserine
RSVSFKLLERWFFRKNWLRLTW

SEQ ID NO: 3592 - protein, 20 aa, Artificial Sequence
  Description of Artificial Sequence: Synthetic peptide
  MOD_RES (4)..(4): phosphoserine
RSVSPVQDLFFRKNWLRLTW

SEQ ID NO: 3593 - protein, 20 aa, Artificial Sequence
  Description of Artificial Sequence: Synthetic peptide
  MOD_RES (4)..(4): phosphoserine
RSVSVATGLFFRKNWLRLTW

SEQ ID NO: 3594 - protein, 22 aa, Artificial Sequence
  Description of Artificial Sequence: Synthetic peptide
  MOD_RES (4)..(4): phosphoserine
RSWSPPPEVSRFFRKNWLRLTW

SEQ ID NO: 3595 - protein, 20 aa, Artificial Sequence
  Description of Artificial Sequence: Synthetic peptide
  MOD_RES (8)..(8): phosphoserine
RSYRTDISMFFRKNWLRLTW

SEQ ID NO: 3596 - protein, 21 aa, Artificial Sequence
  Description of Artificial Sequence: Synthetic peptide
  MOD_RES (4)..(4): phosphoserine
RTASPPALPKFFRKNWLRLTW

SEQ ID NO: 3597 - protein, 21 aa, Artificial Sequence
  Description of Artificial Sequence: Synthetic peptide
  MOD_RES (4)..(4): phosphoserine
RTFSDESNVLFFRKNWLRLTW

SEQ ID NO: 3598 - protein, 20 aa, Artificial Sequence
  Description of Artificial Sequence: Synthetic peptide
  MOD_RES (2)..(2): phosphothreonine
RTFSLDTILFFRKNWLRLTW

SEQ ID NO: 3599 - protein, 23 aa, Artificial Sequence
  Description of Artificial Sequence: Synthetic peptide
  MOD_RES (4)..(4): phosphoserine
RTFSLDTILSSYFFRKNWLRLTW

SEQ ID NO: 3600 - protein, 20 aa, Artificial Sequence
  Description of Artificial Sequence: Synthetic peptide
  MOD_RES (6)..(6): phosphothreonine
RTFSPTYGLFFRKNWLRLTW

SEQ ID NO: 3601 - protein, 20 aa, Artificial Sequence
  Description of Artificial Sequence: Synthetic peptide
  MOD_RES (2)..(2): phosphothreonine
RTHSLLLLLFFRKNWLRLTW

SEQ ID NO: 3602 - protein, 22 aa, Artificial Sequence
  Description of Artificial Sequence: Synthetic peptide
  MOD_RES (2)..(2): phosphothreonine
RTISAQDTLAYFFRKNWLRLTW

SEQ ID NO: 3603 - protein, 22 aa, Artificial Sequence
  Description of Artificial Sequence: Synthetic peptide
  MOD_RES (4)..(4): phosphoserine
RTISAQDTLAYFFRKNWLRLTW

SEQ ID NO: 3604 - protein, 22 aa, Artificial Sequence
  Description of Artificial Sequence: Synthetic peptide
  MOD_RES (4)..(4): phosphoserine
  MOD_RES (10)..(10): oxidized methionine
RTISNPEVVMKFFRKNWLRLTW

SEQ ID NO: 3605 - protein, 22 aa, Artificial Sequence
  Description of Artificial Sequence: Synthetic peptide
  MOD_RES (4)..(4): phosphoserine
RTISNPEVVMKFFRKNWLRLTW

SEQ ID NO: 3606 - protein, 20 aa, Artificial Sequence
  Description of Artificial Sequence: Synthetic peptide
  MOD_RES (4)..(4): phosphoserine
RTKSFLNYYFFRKNWLRLTW

SEQ ID NO: 3607 - protein, 24 aa, Artificial Sequence
  Description of Artificial Sequence: Synthetic peptide
  MOD_RES (4)..(4): phosphoserine
RTLSESFSRIALKFFRKNWLRLTW

SEQ ID NO: 3608 - protein, 22 aa, Artificial Sequence
  Description of Artificial Sequence: Synthetic peptide
  MOD_RES (4)..(4): phosphoserine
RTLSGSILDVYFFRKNWLRLTW

SEQ ID NO: 3609 - protein, 22 aa, Artificial Sequence
  Description of Artificial Sequence: Synthetic peptide
  MOD_RES (2)..(2): phosphothreonine
  MOD_RES (3)..(3): oxidized methionine
RTMSEAALVRKFFRKNWLRLTW

SEQ ID NO: 3610 - protein, 22 aa, Artificial Sequence
  Description of Artificial Sequence: Synthetic peptide
  MOD_RES (2)..(2): phosphothreonine
RTMSEAALVRKFFRKNWLRLTW

SEQ ID NO: 3611 - protein, 20 aa, Artificial Sequence
  Description of Artificial Sequence: Synthetic peptide
  MOD_RES (3)..(3): oxidized methionine
  MOD_RES (4)..(4): phosphoserine
RTMSPIQVLFFRKNWLRLTW

SEQ ID NO: 3612 - protein, 20 aa, Artificial Sequence
  Description of Artificial Sequence: Synthetic peptide
  MOD_RES (4)..(4): phosphoserine
RTMSPIQVLFFRKNWLRLTW

SEQ ID NO: 3613 - protein, 21 aa, Artificial Sequence
  Description of Artificial Sequence: Synthetic peptide
  MOD_RES (4)..(4): phosphoserine
RTPSPARPALFFRKNWLRLTW

SEQ ID NO: 3614 - protein, 20 aa, Artificial Sequence
  Description of Artificial Sequence: Synthetic peptide
  MOD_RES (5)..(5): phosphoserine
RTRLSPPRAFFRKNWLRLTW

SEQ ID NO: 3615 - protein, 20 aa, Artificial Sequence
  Description of Artificial Sequence: Synthetic peptide
  MOD_RES (4)..(4): phosphoserine
RTVSPAHVLFFRKNWLRLTW

SEQ ID NO: 3616 - protein, 20 aa, Artificial Sequence
  Description of Artificial Sequence: Synthetic peptide
  MOD_RES (4)..(4): phosphoserine
  MOD_RES (9)..(9): oxidized methionine
RTYSFTSAMFFRKNWLRLTW

SEQ ID NO: 3617 - protein, 20 aa, Artificial Sequence
  Description of Artificial Sequence: Synthetic peptide
  MOD_RES (4)..(4): phosphoserine
RTYSFTSAMFFRKNWLRLTW

SEQ ID NO: 3618 - protein, 20 aa, Artificial Sequence
  Description of Artificial Sequence: Synthetic peptide
  MOD_RES (6)..(6): phosphothreonine
RVASPTSGVFFRKNWLRLTW

SEQ ID NO: 3619 - protein, 19 aa, Artificial Sequence
  Description of Artificial Sequence: Synthetic peptide
  MOD_RES (7)..(7): phosphoserine
RVDSLVSLFFRKNWLRLTW

SEQ ID NO: 3620 - protein, 20 aa, Artificial Sequence
  Description of Artificial Sequence: Synthetic peptide
  MOD_RES (4)..(4): phosphoserine
  MOD_RES (7)..(7): cysteinylated cysteine
RVDSTTCLFFFRKNWLRLTW

SEQ ID NO: 3621 - protein, 20 aa, Artificial Sequence
  Description of Artificial Sequence: Synthetic peptide
  MOD_RES (5)..(5): phosphothreonine
  MOD_RES (7)..(7): cysteinylated cysteine
RVDSTTCLFFFRKNWLRLTW

SEQ ID NO: 3622 - protein, 20 aa, Artificial Sequence
  Description of Artificial Sequence: Synthetic peptide
  MOD_RES (6)..(6): phosphothreonine
  MOD_RES (7)..(7): cysteinylated cysteine
RVDSTTCLFFFRKNWLRLTW

SEQ ID NO: 3623 - protein, 22 aa, Artificial Sequence
  Description of Artificial Sequence: Synthetic peptide
  MOD_RES (4)..(4): phosphoserine
RVISLEDFMEKFFRKNWLRLTW

SEQ ID NO: 3624 - protein, 21 aa, Artificial Sequence
  Description of Artificial Sequence: Synthetic peptide
  MOD_RES (6)..(6): phosphothreonine
RVKTPTSQSYFFRKNWLRLTW

SEQ ID NO: 3625 - protein, 23 aa, Artificial Sequence
  Description of Artificial Sequence: Synthetic peptide
  MOD_RES (9)..(9): phosphoserine
RVKVDGPRSPSYFFRKNWLRLTW

SEQ ID NO: 3626 - protein, 23 aa, Artificial Sequence
  Description of Artificial Sequence: Synthetic peptide
  MOD_RES (11)..(11): phosphoserine
RVKVDGPRSPSYFFRKNWLRLTW

SEQ ID NO: 3627 - protein, 20 aa, Artificial Sequence
  Description of Artificial Sequence: Synthetic peptide
  MOD_RES (4)..(4): phosphoserine
  MOD_RES (7)..(7): oxidized methionine
RVLSPLMSRFFRKNWLRLTW

SEQ ID NO: 3628 - protein, 20 aa, Artificial Sequence
  Description of Artificial Sequence: Synthetic peptide
  MOD_RES (4)..(4): phosphoserine
RVLSPLMSRFFRKNWLRLTW

SEQ ID NO: 3629 - protein, 20 aa, Artificial Sequence
  Description of Artificial Sequence: Synthetic peptide
  MOD_RES (4)..(4): phosphoserine
RVPSINQKIFFRKNWLRLTW

SEQ ID NO: 3630 - protein, 21 aa, Artificial Sequence
  Description of Artificial Sequence: Synthetic peptide
  MOD_RES (4)..(4): phosphoserine
RVRSFLRGLPFFRKNWLRLTW

SEQ ID NO: 3631 - protein, 21 aa, Artificial Sequence
  Description of Artificial Sequence: Synthetic peptide
  MOD_RES (4)..(4): phosphoserine
RVRSPGTGAFFFRKNWLRLTW

SEQ ID NO: 3632 - protein, 20 aa, Artificial Sequence
  Description of Artificial Sequence: Synthetic peptide
  MOD_RES (3)..(3): phosphoserine
RVSSLTLHLFFRKNWLRLTW

SEQ ID NO: 3633 - protein, 20 aa, Artificial Sequence
  Description of Artificial Sequence: Synthetic peptide
  MOD_RES (4)..(4): phosphoserine
RVSSLTLHLFFRKNWLRLTW

SEQ ID NO: 3634 - protein, 20 aa, Artificial Sequence
  Description of Artificial Sequence: Synthetic peptide
  MOD_RES (6)..(6): phosphothreonine
RVSSLTLHLFFRKNWLRLTW

SEQ ID NO: 3635 - protein, 20 aa, Artificial Sequence
  Description of Artificial Sequence: Synthetic peptide
  MOD_RES (5)..(5): phosphothreonine
RVVLTPLKVFFRKNWLRLTW

SEQ ID NO: 3636 - protein, 20 aa, Artificial Sequence
  Description of Artificial Sequence: Synthetic peptide
  MOD_RES (4)..(4): phosphoserine
RVVSPGIDLFFRKNWLRLTW

SEQ ID NO: 3637 - protein, 22 aa, Artificial Sequence
  Description of Artificial Sequence: Synthetic peptide
  MOD_RES (4)..(4): phosphoserine
RVYSLDDIRRYFFRKNWLRLTW

SEQ ID NO: 3638 - protein, 20 aa, Artificial Sequence
  Description of Artificial Sequence: Synthetic peptide
  MOD_RES (4)..(4): phosphoserine
RVYSRFEVFFFRKNWLRLTW

SEQ ID NO: 3639 - protein, 22 aa, Artificial Sequence
  Description of Artificial Sequence: Synthetic peptide
  MOD_RES (5)..(5): phosphoserine
RVYYSPPVARRFFRKNWLRLTW

SEQ ID NO: 3640 - protein, 20 aa, Artificial Sequence
  Description of Artificial Sequence: Synthetic peptide
  MOD_RES (4)..(4): phosphoserine
RWNSKENLLFFRKNWLRLTW

SEQ ID NO: 3641 - protein, 21 aa, Artificial Sequence
  Description of Artificial Sequence: Synthetic peptide
  MOD_RES (6)..(6): phosphoserine
RYARYSPRQRFFRKNWLRLTW

SEQ ID NO: 3642 - protein, 20 aa, Artificial Sequence
  Description of Artificial Sequence: Synthetic peptide
  MOD_RES (4)..(4): phosphoserine
RYDSRTTIFFFRKNWLRLTW

SEQ ID NO: 3643 - protein, 20 aa, Artificial Sequence
  Description of Artificial Sequence: Synthetic peptide
  MOD_RES (5)..(5): phosphothreonine
RYFKTPRKFFFRKNWLRLTW

SEQ ID NO: 3644 - protein, 21 aa, Artificial Sequence
  Description of Artificial Sequence: Synthetic peptide
  MOD_RES (4)..(4): phosphoserine
  MOD_RES (8)..(8): oxidized methionine
RYHSLAPMYYFFRKNWLRLTW

SEQ ID NO: 3645 - protein, 21 aa, Artificial Sequence
  Description of Artificial Sequence: Synthetic peptide
  MOD_RES (4)..(4): phosphoserine
RYHSLAPMYYFFRKNWLRLTW

SEQ ID NO: 3646 - protein, 20 aa, Artificial Sequence
  Description of Artificial Sequence: Synthetic peptide
  MOD_RES (3)..(3): phosphothreonine
RYTNRVVTLFFRKNWLRLTW

SEQ ID NO: 3647 - protein, 22 aa, Artificial Sequence
  Description of Artificial Sequence: Synthetic peptide
  MOD_RES (4)..(4): phosphoserine
SAFSSRGSLSLFFRKNWLRLTW

SEQ ID NO: 3648 - protein, 20 aa, Artificial Sequence
  Description of Artificial Sequence: Synthetic peptide
  MOD_RES (1)..(1): phosphoserine
SAISPTPEIFFRKNWLRLTW

SEQ ID NO: 3649 - protein, 20 aa, Artificial Sequence
  Description of Artificial Sequence: Synthetic peptide
  MOD_RES (4)..(4): phosphoserine
SAISPTPEIFFRKNWLRLTW

SEQ ID NO: 3650 - protein, 24 aa, Artificial Sequence
  Description of Artificial Sequence: Synthetic peptide
  MOD_RES (8)..(8): phosphoserine
SAYGGLTSPGLSYFFRKNWLRLTW

SEQ ID NO: 3651 - protein, 20 aa, Artificial Sequence
  Description of Artificial Sequence: Synthetic peptide
  MOD_RES (4)..(4): phosphoserine
SEASLASALFFRKNWLRLTW

SEQ ID NO: 3652 - protein, 20 aa, Artificial Sequence
  Description of Artificial Sequence: Synthetic peptide
  MOD_RES (6)..(6): oxidized methionine
  MOD_RES (8)..(8): phosphoserine
SEFKAMDSIFFRKNWLRLTW

SEQ ID NO: 3653 - protein, 20 aa, Artificial Sequence
  Description of Artificial Sequence: Synthetic peptide
  MOD_RES (4)..(4): phosphoserine
SEFSDVDKLFFRKNWLRLTW

SEQ ID NO: 3654 - protein, 22 aa, Artificial Sequence
  Description of Artificial Sequence: Synthetic peptide
  MOD_RES (4)..(4): phosphoserine
SEISPIKGSVRFFRKNWLRLTW

SEQ ID NO: 3655 - protein, 21 aa, Artificial Sequence
  Description of Artificial Sequence: Synthetic peptide
  MOD_RES (5)..(5): phosphoserine
SELRSPRISYFFRKNWLRLTW

SEQ ID NO: 3656 - protein, 20 aa, Artificial Sequence
  Description of Artificial Sequence: Synthetic peptide
  MOD_RES (4)..(4): phosphothreonine
SELTPSESLFFRKNWLRLTW

SEQ ID NO: 3657 - protein, 20 aa, Artificial Sequence
  Description of Artificial Sequence: Synthetic peptide
  MOD_RES (6)..(6): phosphoserine
SELTPSESLFFRKNWLRLTW

SEQ ID NO: 3658 - protein, 21 aa, Artificial Sequence
  Description of Artificial Sequence: Synthetic peptide
  MOD_RES (3)..(3): phosphoserine
SESSIKKKFLFFRKNWLRLTW

SEQ ID NO: 3659 - protein, 21 aa, Artificial Sequence
  Description of Artificial Sequence: Synthetic peptide
  MOD_RES (4)..(4): phosphoserine
SESSIKKKFLFFRKNWLRLTW

SEQ ID NO: 3660 - protein, 20 aa, Artificial Sequence
  Description of Artificial Sequence: Synthetic peptide
  MOD_RES (4)..(4): phosphoserine
SFDSREASFFFRKNWLRLTW

SEQ ID NO: 3661 - protein, 24 aa, Artificial Sequence
  Description of Artificial Sequence: Synthetic peptide
  MOD_RES (4)..(4): phosphoserine
SFLSQDESHDHSFFFRKNWLRLTW

SEQ ID NO: 3662 - protein, 25 aa, Artificial Sequence
  Description of Artificial Sequence: Synthetic peptide
  MOD_RES (1)..(1): phosphoserine
SGEGDFLAEGGGVRFFRKNWLRLTW

SEQ ID NO: 3663 - protein, 20 aa, Artificial Sequence
  Description of Artificial Sequence: Synthetic peptide
  MOD_RES (5)..(5): phosphoserine
  MOD_RES (9)..(9): oxidized tryptophan
SGFRSPHLWFFRKNWLRLTW

SEQ ID NO: 3664 - protein, 20 aa, Artificial Sequence
  Description of Artificial Sequence: Synthetic peptide
  MOD_RES (5)..(5): phosphoserine
SGFRSPHLWFFRKNWLRLTW

SEQ ID NO: 3665 - protein, 20 aa, Artificial Sequence
  Description of Artificial Sequence: Synthetic peptide
  MOD_RES (5)..(5): phosphoserine
SIDISQDKLFFRKNWLRLTW

SEQ ID NO: 3666 - protein, 20 aa, Artificial Sequence
  Description of Artificial Sequence: Synthetic peptide
  MOD_RES (1)..(1): phosphoserine
SIDSPKSYIFFRKNWLRLTW

SEQ ID NO: 3667 - protein, 20 aa, Artificial Sequence
  Description of Artificial Sequence: Synthetic peptide
  MOD_RES (5)..(5): phosphothreonine
SIFRTPISKFFRKNWLRLTW

SEQ ID NO: 3668 - protein, 19 aa, Artificial Sequence
  Description of Artificial Sequence: Synthetic peptide
  MOD_RES (7)..(7): phosphothreonine
SIIKEKTVFFRKNWLRLTW

SEQ ID NO: 3669 - protein, 22 aa, Artificial Sequence
  Description of Artificial Sequence: Synthetic peptide
  MOD_RES (4)..(4): phosphoserine
SIISPKVKMALFFRKNWLRLTW

SEQ ID NO: 3670 - protein, 20 aa, Artificial Sequence
  Description of Artificial Sequence: Synthetic peptide
  MOD_RES (4)..(4): phosphoserine
SIISPNFSFFFRKNWLRLTW

SEQ ID NO: 3671 - protein, 20 aa, Artificial Sequence
  Description of Artificial Sequence: Synthetic peptide
  MOD_RES (4)..(4): phosphoserine
SILSRTPSVFFRKNWLRLTW

SEQ ID NO: 3672 - protein, 20 aa, Artificial Sequence
  Description of Artificial Sequence: Synthetic peptide
  MOD_RES (1)..(1): phosphoserine
SIPSLVDGFFFRKNWLRLTW

SEQ ID NO: 3673 - protein, 20 aa, Artificial Sequence
  Description of Artificial Sequence: Synthetic peptide
  MOD_RES (4)..(4): phosphoserine
SIPSLVDGFFFRKNWLRLTW

SEQ ID NO: 3674 - protein, 20 aa, Artificial Sequence
  Description of Artificial Sequence: Synthetic peptide
  MOD_RES (6)..(6): phosphoserine
SIPTVSGQIFFRKNWLRLTW

SEQ ID NO: 3675 - protein, 20 aa, Artificial Sequence
  Description of Artificial Sequence: Synthetic peptide
  MOD_RES (4)..(4): phosphoserine
SISSIDRELFFRKNWLRLTW

SEQ ID NO: 3676 - protein, 20 aa, Artificial Sequence
  Description of Artificial Sequence: Synthetic peptide
  MOD_RES (4)..(4): phosphoserine
  MOD_RES (5)..(5): oxidized methionine
SISSMEVNVFFRKNWLRLTW

SEQ ID NO: 3677 - protein, 19 aa, Artificial Sequence
  Description of Artificial Sequence: Synthetic peptide
  MOD_RES (3)..(3): phosphoserine
SISTLVTLFFRKNWLRLTW

SEQ ID NO: 3678 - protein, 19 aa, Artificial Sequence
  Description of Artificial Sequence: Synthetic peptide
  MOD_RES (4)..(4): phosphothreonine
SISTLVTLFFRKNWLRLTW

SEQ ID NO: 3679 - protein, 20 aa, Artificial Sequence
  Description of Artificial Sequence: Synthetic peptide
  MOD_RES (3)..(3): phosphothreonine
SITSLEAIIFFRKNWLRLTW

SEQ ID NO: 3680 - protein, 22 aa, Artificial Sequence
  Description of Artificial Sequence: Synthetic peptide
  MOD_RES (4)..(4): phosphoserine
SIVSPRKLPALFFRKNWLRLTW

SEQ ID NO: 3681 - protein, 21 aa, Artificial Sequence
  Description of Artificial Sequence: Synthetic peptide
  MOD_RES (7)..(7): phosphothreonine
SKMAFLTRVAFFRKNWLRLTW

SEQ ID NO: 3682 - protein, 20 aa, Artificial Sequence
  Description of Artificial Sequence: Synthetic peptide
  MOD_RES (4)..(4): phosphoserine
SLASKVTRLFFRKNWLRLTW

SEQ ID NO: 3683 - protein, 20 aa, Artificial Sequence
  Description of Artificial Sequence: Synthetic peptide
  MOD_RES (4)..(4): phosphoserine
SLASLLAKVFFRKNWLRLTW

SEQ ID NO: 3684 - protein, 23 aa, Artificial Sequence
  Description of Artificial Sequence: Synthetic peptide
  MOD_RES (4)..(4): phosphoserine
  MOD_RES (10)..(10): oxidized methionine
SLDSPGPEKMALFFRKNWLRLTW

SEQ ID NO: 3685 - protein, 23 aa, Artificial Sequence
  Description of Artificial Sequence: Synthetic peptide
  MOD_RES (4)..(4): phosphoserine
SLDSPGPEKMALFFRKNWLRLTW

SEQ ID NO: 3686 - protein, 20 aa, Artificial Sequence
  Description of Artificial Sequence: Synthetic peptide
  MOD_RES (5)..(5): phosphoserine
SLFGSPVAKFFRKNWLRLTW

SEQ ID NO: 3687 - protein, 20 aa, Artificial Sequence
  Description of Artificial Sequence: Synthetic peptide
  MOD_RES (5)..(5): phosphothreonine
SLFHTPKFVFFRKNWLRLTW

SEQ ID NO: 3688 - protein, 23 aa, Artificial Sequence
  Description of Artificial Sequence: Synthetic peptide
  MOD_RES (5)..(5): phosphoserine
SLFSSEESNLGAFFRKNWLRLTW

SEQ ID NO: 3689 - protein, 20 aa, Artificial Sequence
  Description of Artificial Sequence: Synthetic peptide
  MOD_RES (4)..(4): phosphoserine
SLLSELQHAFFRKNWLRLTW

SEQ ID NO: 3690 - protein, 20 aa, Artificial Sequence
  Description of Artificial Sequence: Synthetic peptide
  MOD_RES (4)..(4): phosphoserine
SLLSLSATVFFRKNWLRLTW

SEQ ID NO: 3691 - protein, 20 aa, Artificial Sequence
  Description of Artificial Sequence: Synthetic peptide
  MOD_RES (4)..(4): phosphoserine
SLLSVSHALFFRKNWLRLTW

SEQ ID NO: 3692 - protein, 22 aa, Artificial Sequence
  Description of Artificial Sequence: Synthetic peptide
  MOD_RES (4)..(4): phosphothreonine
SLLTPVRLPSIFFRKNWLRLTW

SEQ ID NO: 3693 - protein, 21 aa, Artificial Sequence
  Description of Artificial Sequence: Synthetic peptide
  MOD_RES (3)..(3): oxidized methionine
  MOD_RES (4)..(4): phosphoserine
SLMSGTLESLFFRKNWLRLTW

SEQ ID NO: 3694 - protein, 21 aa, Artificial Sequence
  Description of Artificial Sequence: Synthetic peptide
  MOD_RES (3)..(3): oxidized methionine
  MOD_RES (6)..(6): phosphothreonine
SLMSGTLESLFFRKNWLRLTW

SEQ ID NO: 3695 - protein, 21 aa, Artificial Sequence
  Description of Artificial Sequence: Synthetic peptide
  MOD_RES (6)..(6): phosphothreonine
SLMSGTLESLFFRKNWLRLTW

SEQ ID NO: 3696 - protein, 20 aa, Artificial Sequence
  Description of Artificial Sequence: Synthetic peptide
  MOD_RES (4)..(4): phosphoserine
SLSSERYYLFFRKNWLRLTW

SEQ ID NO: 3697 - protein, 22 aa, Artificial Sequence
  Description of Artificial Sequence: Synthetic peptide
  MOD_RES (3)..(3): phosphoserine
SLSSLRAHLEYFFRKNWLRLTW

SEQ ID NO: 3698 - protein, 22 aa, Artificial Sequence
  Description of Artificial Sequence: Synthetic peptide
  MOD_RES (4)..(4): phosphoserine
SLSSLRAHLEYFFRKNWLRLTW

SEQ ID NO: 3699 - protein, 22 aa, Artificial Sequence
  Description of Artificial Sequence: Synthetic peptide
  MOD_RES (2)..(2): oxidized methionine
  MOD_RES (4)..(4): phosphoserine
SMKSPLYLVSRFFRKNWLRLTW

SEQ ID NO: 3700 - protein, 22 aa, Artificial Sequence
  Description of Artificial Sequence: Synthetic peptide
  MOD_RES (4)..(4): phosphoserine
SMKSPLYLVSRFFRKNWLRLTW

SEQ ID NO: 3701 - protein, 20 aa, Artificial Sequence
  Description of Artificial Sequence: Synthetic peptide
  MOD_RES (8)..(8): phosphoserine
SPAARSLSLFFRKNWLRLTW

SEQ ID NO: 3702 - protein, 20 aa, Artificial Sequence
  Description of Artificial Sequence: Synthetic peptide
  MOD_RES (4)..(4): phosphoserine
SPASPLKELFFRKNWLRLTW

SEQ ID NO: 3703 - protein, 22 aa, Artificial Sequence
  Description of Artificial Sequence: Synthetic peptide
  MOD_RES (5)..(5): phosphoserine
SPDISPPIFRRFFRKNWLRLTW

SEQ ID NO: 3704 - protein, 19 aa, Artificial Sequence
  Description of Artificial Sequence: Synthetic peptide
  MOD_RES (8)..(8): phosphoserine
SPFKRQLSFFRKNWLRLTW

SEQ ID NO: 3705 - protein, 20 aa, Artificial Sequence
  Description of Artificial Sequence: Synthetic peptide
  MOD_RES (8)..(8): phosphoserine
SPFLSKRSLFFRKNWLRLTW

SEQ ID NO: 3706 - protein, 21 aa, Artificial Sequence
  Description of Artificial Sequence: Synthetic peptide
  MOD_RES (7)..(7): phosphoserine
SPFSSRSPSLFFRKNWLRLTW

SEQ ID NO: 3707 - protein, 21 aa, Artificial Sequence
  Description of Artificial Sequence: Synthetic peptide
  MOD_RES (4)..(4): phosphoserine
SPGSPWKTKLFFRKNWLRLTW

SEQ ID NO: 3708 - protein, 20 aa, Artificial Sequence
  Description of Artificial Sequence: Synthetic peptide
  MOD_RES (1)..(1): phosphoserine
SPHSPFYQLFFRKNWLRLTW

SEQ ID NO: 3709 - protein, 20 aa, Artificial Sequence
  Description of Artificial Sequence: Synthetic peptide
  MOD_RES (4)..(4): phosphoserine
SPHSPFYQLFFRKNWLRLTW

SEQ ID NO: 3710 - protein, 21 aa, Artificial Sequence
  Description of Artificial Sequence: Synthetic peptide
  MOD_RES (4)..(4): phosphoserine
SPISDEEERLFFRKNWLRLTW

SEQ ID NO: 3711 - protein, 22 aa, Artificial Sequence
  Description of Artificial Sequence: Synthetic peptide
  MOD_RES (4)..(4): phosphoserine
SPISPRTQDALFFRKNWLRLTW

SEQ ID NO: 3712 - protein, 22 aa, Artificial Sequence
  Description of Artificial Sequence: Synthetic peptide
  MOD_RES (4)..(4): phosphoserine
SPISPTRQDALFFRKNWLRLTW

SEQ ID NO: 3713 - protein, 21 aa, Artificial Sequence
  Description of Artificial Sequence: Synthetic peptide
  MOD_RES (6)..(6): phosphoserine
SPITSSPPKWFFRKNWLRLTW

SEQ ID NO: 3714 - protein, 20 aa, Artificial Sequence
  Description of Artificial Sequence: Synthetic peptide
  MOD_RES (6)..(6): phosphothreonine
SPKPPTRSPFFRKNWLRLTW

SEQ ID NO: 3715 - protein, 20 aa, Artificial Sequence
  Description of Artificial Sequence: Synthetic peptide
  MOD_RES (8)..(8): phosphoserine
SPKPPTRSPFFRKNWLRLTW

SEQ ID NO: 3716 - protein, 21 aa, Artificial Sequence
  Description of Artificial Sequence: Synthetic peptide
  MOD_RES (4)..(4): phosphoserine
SPPSPARWSLFFRKNWLRLTW

SEQ ID NO: 3717 - protein, 19 aa, Artificial Sequence
  Description of Artificial Sequence: Synthetic peptide
  MOD_RES (6)..(6): phosphoserine
SPRAGSPFFFRKNWLRLTW

SEQ ID NO: 3718 - protein, 28 aa, Artificial Sequence
  Description of Artificial Sequence: Synthetic peptide
  MOD_RES (6)..(6): phosphoserine
SPRAGSPFSPPPSSSSLFFRKNWLRLTW

SEQ ID NO: 3719 - protein, 23 aa, Artificial Sequence
  Description of Artificial Sequence: Synthetic peptide
  MOD_RES (6)..(6): phosphoserine
SPRLVSRSSSVLFFRKNWLRLTW

SEQ ID NO: 3720 - protein, 21 aa, Artificial Sequence
  Description of Artificial Sequence: Synthetic peptide
  MOD_RES (9)..(9): phosphoserine
SPRPPNSPSIFFRKNWLRLTW

SEQ ID NO: 3721 - protein, 23 aa, Artificial Sequence
  Description of Artificial Sequence: Synthetic peptide
  MOD_RES (7)..(7): phosphoserine
SPRPPNSPSISIFFRKNWLRLTW

SEQ ID NO: 3722 - protein, 21 aa, Artificial Sequence
  Description of Artificial Sequence: Synthetic peptide
  MOD_RES (5)..(5): phosphothreonine
SPRPTSAPAIFFRKNWLRLTW

SEQ ID NO: 3723 - protein, 21 aa, Artificial Sequence
  Description of Artificial Sequence: Synthetic peptide
  MOD_RES (6)..(6): phosphoserine
SPRPTSAPAIFFRKNWLRLTW

SEQ ID NO: 3724 - protein, 22 aa, Artificial Sequence
  Description of Artificial Sequence: Synthetic peptide
  MOD_RES (6)..(6): phosphoserine
SPRRPSRVSEFFFRKNWLRLTW

SEQ ID NO: 3725 - protein, 23 aa, Artificial Sequence
  Description of Artificial Sequence: Synthetic peptide
  MOD_RES (6)..(6): phosphoserine
SPRRPSRVSEFLFFRKNWLRLTW

SEQ ID NO: 3726 - protein, 21 aa, Artificial Sequence
  Description of Artificial Sequence: Synthetic peptide
  MOD_RES (1)..(1): phosphoserine
SPRSPISPELFFRKNWLRLTW

SEQ ID NO: 3727 - protein, 21 aa, Artificial Sequence
  Description of Artificial Sequence: Synthetic peptide
  MOD_RES (4)..(4): phosphoserine
SPRSPISPELFFRKNWLRLTW

SEQ ID NO: 3728 - protein, 21 aa, Artificial Sequence
  Description of Artificial Sequence: Synthetic peptide
  MOD_RES (1)..(1): phosphoserine
SPRSPSTTYLFFRKNWLRLTW

SEQ ID NO: 3729 - protein, 20 aa, Artificial Sequence
  Description of Artificial Sequence: Synthetic peptide
  MOD_RES (4)..(4): phosphoserine
SPRSPTTTLFFRKNWLRLTW

SEQ ID NO: 3730 - protein, 22 aa, Artificial Sequence
  Description of Artificial Sequence: Synthetic peptide
  MOD_RES (4)..(4): phosphoserine
SPRSPVNKTTLFFRKNWLRLTW

SEQ ID NO: 3731 - protein, 21 aa, Artificial Sequence
  Description of Artificial Sequence: Synthetic peptide
  MOD_RES (1)..(1): phosphoserine
SPRSPVPTTLFFRKNWLRLTW

SEQ ID NO: 3732 - protein, 21 aa, Artificial Sequence
  Description of Artificial Sequence: Synthetic peptide
  MOD_RES (4)..(4): phosphoserine
SPRSPVPTTLFFRKNWLRLTW

SEQ ID NO: 3733 - protein, 21 aa, Artificial Sequence
  Description of Artificial Sequence: Synthetic peptide
  MOD_RES (1)..(1): phosphoserine
SPRTPPPLTVFFRKNWLRLTW

SEQ ID NO: 3734 - protein, 21 aa, Artificial Sequence
  Description of Artificial Sequence: Synthetic peptide
  MOD_RES (4)..(4): phosphothreonine
SPRTPPPLTVFFRKNWLRLTW

SEQ ID NO: 3735 - protein, 23 aa, Artificial Sequence
  Description of Artificial Sequence: Synthetic peptide
  MOD_RES (6)..(6): phosphothreonine
SPRTPTPFKHALFFRKNWLRLTW

SEQ ID NO: 3736 - protein, 22 aa, Artificial Sequence
  Description of Artificial Sequence: Synthetic peptide
  MOD_RES (4)..(4): phosphothreonine
SPRTPVSPVKFFFRKNWLRLTW

SEQ ID NO: 3737 - protein, 20 aa, Artificial Sequence
  Description of Artificial Sequence: Synthetic peptide
  MOD_RES (3)..(3): phosphoserine
SPSPLPVALFFRKNWLRLTW

SEQ ID NO: 3738 - protein, 20 aa, Artificial Sequence
  Description of Artificial Sequence: Synthetic peptide
  MOD_RES (3)..(3): phosphoserine
  MOD_RES (5)..(5): oxidized methionine
SPSPMDPHMFFRKNWLRLTW

SEQ ID NO: 3739 - protein, 20 aa, Artificial Sequence
  Description of Artificial Sequence: Synthetic peptide
  MOD_RES (3)..(3): phosphoserine
  MOD_RES (9)..(9): oxidized methionine
SPSPMDPHMFFRKNWLRLTW

SEQ ID NO: 3740 - protein, 20 aa, Artificial Sequence
  Description of Artificial Sequence: Synthetic peptide
  MOD_RES (3)..(3): phosphoserine
SPSPMDPHMFFRKNWLRLTW

SEQ ID NO: 3741 - protein, 20 aa, Artificial Sequence
  Description of Artificial Sequence: Synthetic peptide
  MOD_RES (3)..(3): phosphothreonine
SPTSPDYSLFFRKNWLRLTW

SEQ ID NO: 3742 - protein, 20 aa, Artificial Sequence
  Description of Artificial Sequence: Synthetic peptide
  MOD_RES (3)..(3): phosphothreonine
SPTSPFSSLFFRKNWLRLTW

SEQ ID NO: 3743 - protein, 20 aa, Artificial Sequence
  Description of Artificial Sequence: Synthetic peptide
  MOD_RES (4)..(4): phosphoserine
SPTSPFSSLFFRKNWLRLTW

SEQ ID NO: 3744 - protein, 22 aa, Artificial Sequence
  Description of Artificial Sequence: Synthetic peptide
  MOD_RES (10)..(10): phosphoserine
SPVNKVRRVSFFFRKNWLRLTW

SEQ ID NO: 3745 - protein, 21 aa, Artificial Sequence
  Description of Artificial Sequence: Synthetic peptide
  MOD_RES (4)..(4): phosphoserine
SPVSPKSLAFFFRKNWLRLTW

SEQ ID NO: 3746 - protein, 20 aa, Artificial Sequence
  Description of Artificial Sequence: Synthetic peptide
  MOD_RES (4)..(4): phosphoserine
  MOD_RES (6)..(6): oxidized methionine
SPVSPMKELFFRKNWLRLTW

SEQ ID NO: 3747 - protein, 19 aa, Artificial Sequence
  Description of Artificial Sequence: Synthetic peptide
  MOD_RES (4)..(4): phosphoserine
  MOD_RES (8)..(8): oxidized methionine
SQDSPIFMFFRKNWLRLTW

SEQ ID NO: 3748 - protein, 19 aa, Artificial Sequence
  Description of Artificial Sequence: Synthetic peptide
  MOD_RES (4)..(4): phosphoserine
SQDSPIFMFFRKNWLRLTW

SEQ ID NO: 3749 - protein, 20 aa, Artificial Sequence
  Description of Artificial Sequence: Synthetic peptide
  MOD_RES (8)..(8): phosphoserine
SQILRTPSLFFRKNWLRLTW

SEQ ID NO: 3750 - protein, 21 aa, Artificial Sequence
  Description of Artificial Sequence: Synthetic peptide
  MOD_RES (5)..(5): phosphoserine
SRFHSPSTTWFFRKNWLRLTW

SEQ ID NO: 3751 - protein, 20 aa, Artificial Sequence
  Description of Artificial Sequence: Synthetic peptide
  MOD_RES (4)..(4): phosphoserine
SRFSGGFGAFFRKNWLRLTW

SEQ ID NO: 3752 - protein, 23 aa, Artificial Sequence
  Description of Artificial Sequence: Synthetic peptide
  MOD_RES (4)..(4): phosphoserine
SRFSGGFGARDYFFRKNWLRLTW

SEQ ID NO: 3753 - protein, 21 aa, Artificial Sequence
  Description of Artificial Sequence: Synthetic peptide
  MOD_RES (4)..(4): phosphoserine
SRHSGPFFTFFFRKNWLRLTW

SEQ ID NO: 3754 - protein, 22 aa, Artificial Sequence
  Description of Artificial Sequence: Synthetic peptide
  MOD_RES (5)..(5): phosphoserine
SRKESYSVYVYFFRKNWLRLTW

SEQ ID NO: 3755 - protein, 20 aa, Artificial Sequence
  Description of Artificial Sequence: Synthetic peptide
  MOD_RES (4)..(4): phosphoserine
SRKSFVFELFFRKNWLRLTW

SEQ ID NO: 3756 - protein, 18 aa, Artificial Sequence
  Description of Artificial Sequence: Synthetic peptide
  MOD_RES (4)..(4): phosphoserine
SRLSLRRFFRKNWLRLTW

SEQ ID NO: 3757 - protein, 20 aa, Artificial Sequence
  Description of Artificial Sequence: Synthetic peptide
  MOD_RES (4)..(4): phosphoserine
SRLSLRRSLFFRKNWLRLTW

SEQ ID NO: 3758 - protein, 21 aa, Artificial Sequence
  Description of Artificial Sequence: Synthetic peptide
  MOD_RES (5)..(5): oxidized methionine
  MOD_RES (6)..(6): phosphoserine
SRPSMSPTPLFFRKNWLRLTW

SEQ ID NO: 3759 - protein, 21 aa, Artificial Sequence
  Description of Artificial Sequence: Synthetic peptide
  MOD_RES (6)..(6): phosphoserine
SRPSMSPTPLFFRKNWLRLTW

SEQ ID NO: 3760 - protein, 20 aa, Artificial Sequence
  Description of Artificial Sequence: Synthetic peptide
  MOD_RES (4)..(4): phosphoserine
SRRSIFEMYFFRKNWLRLTW

SEQ ID NO: 3761 - protein, 19 aa, Artificial Sequence
  Description of Artificial Sequence: Synthetic peptide
  MOD_RES (4)..(4): phosphoserine
SRSSPLKLFFRKNWLRLTW

SEQ ID NO: 3762 - protein, 22 aa, Artificial Sequence
  Description of Artificial Sequence: Synthetic peptide
  MOD_RES (4)..(4): phosphoserine
SSISPSTLTLKFFRKNWLRLTW

SEQ ID NO: 3763 - protein, 22 aa, Artificial Sequence
  Description of Artificial Sequence: Synthetic peptide
  MOD_RES (4)..(4): phosphoserine
SSLSGEELVTKFFRKNWLRLTW

SEQ ID NO: 3764 - protein, 21 aa, Artificial Sequence
  Description of Artificial Sequence: Synthetic peptide
  MOD_RES (5)..(5): phosphoserine
SSLSSPLNPKFFRKNWLRLTW

SEQ ID NO: 3765 - protein, 20 aa, Artificial Sequence
  Description of Artificial Sequence: Synthetic peptide
  MOD_RES (4)..(4): phosphoserine
SSSSPFKFKFFRKNWLRLTW

SEQ ID NO: 3766 - protein, 23 aa, Artificial Sequence
  Description of Artificial Sequence: Synthetic peptide
  MOD_RES (4)..(4): phosphoserine
STASAITPSVSRFFRKNWLRLTW

SEQ ID NO: 3767 - protein, 21 aa, Artificial Sequence
  Description of Artificial Sequence: Synthetic peptide
  MOD_RES (9)..(9): phosphoserine
STGGGTVISRFFRKNWLRLTW

SEQ ID NO: 3768 - protein, 20 aa, Artificial Sequence
  Description of Artificial Sequence: Synthetic peptide
  MOD_RES (3)..(3): phosphoserine
STSLEKNNVFFRKNWLRLTW

SEQ ID NO: 3769 - protein, 21 aa, Artificial Sequence
  Description of Artificial Sequence: Synthetic peptide
  MOD_RES (4)..(4): phosphoserine
SVFSPSFGLKFFRKNWLRLTW

SEQ ID NO: 3770 - protein, 20 aa, Artificial Sequence
  Description of Artificial Sequence: Synthetic peptide
  MOD_RES (4)..(4): phosphoserine
SVISDDSVLFFRKNWLRLTW

SEQ ID NO: 3771 - protein, 20 aa, Artificial Sequence
  Description of Artificial Sequence: Synthetic peptide
  MOD_RES (4)..(4): phosphoserine
SVISGISSRFFRKNWLRLTW

SEQ ID NO: 3772 - protein, 20 aa, Artificial Sequence
  Description of Artificial Sequence: Synthetic peptide
  MOD_RES (5)..(5): phosphoserine
SVISSPLLKFFRKNWLRLTW

SEQ ID NO: 3773 - protein, 20 aa, Artificial Sequence
  Description of Artificial Sequence: Synthetic peptide
  MOD_RES (4)..(4): phosphoserine
SVLSPLLNKFFRKNWLRLTW

SEQ ID NO: 3774 - protein, 21 aa, Artificial Sequence
  Description of Artificial Sequence: Synthetic peptide
  MOD_RES (4)..(4): phosphoserine
SVLSPTSWEKFFRKNWLRLTW

SEQ ID NO: 3775 - protein, 20 aa, Artificial Sequence
  Description of Artificial Sequence: Synthetic peptide
  MOD_RES (4)..(4): phosphoserine
SVLSYTSVRFFRKNWLRLTW

SEQ ID NO: 3776 - protein, 20 aa, Artificial Sequence
  Description of Artificial Sequence: Synthetic peptide
  MOD_RES (4)..(4): phosphothreonine
SVLTPLLLRFFRKNWLRLTW

SEQ ID NO: 3777 - protein, 23 aa, Artificial Sequence
  Description of Artificial Sequence: Synthetic peptide
  MOD_RES (8)..(8): phosphoserine
SVPEFPLSPPKKFFRKNWLRLTW

SEQ ID NO: 3778 - protein, 22 aa, Artificial Sequence
  Description of Artificial Sequence: Synthetic peptide
  MOD_RES (4)..(4): phosphoserine
SVQSDQGYISRFFRKNWLRLTW

SEQ ID NO: 3779 - protein, 20 aa, Artificial Sequence
  Description of Artificial Sequence: Synthetic peptide
  MOD_RES (4)..(4): phosphoserine
SVSSLEVHFFFRKNWLRLTW

SEQ ID NO: 3780 - protein, 20 aa, Artificial Sequence
  Description of Artificial Sequence: Synthetic peptide
  MOD_RES (4)..(4): phosphoserine
  MOD_RES (8)..(8): oxidized methionine
SVTSPIKMKFFRKNWLRLTW

SEQ ID NO: 3781 - protein, 20 aa, Artificial Sequence
  Description of Artificial Sequence: Synthetic peptide
  MOD_RES (4)..(4): phosphoserine
SVTSPIKMKFFRKNWLRLTW

SEQ ID NO: 3782 - protein, 23 aa, Artificial Sequence
  Description of Artificial Sequence: Synthetic peptide
  MOD_RES (4)..(4): phosphoserine
SVVSFDKVKEPRFFRKNWLRLTW

SEQ ID NO: 3783 - protein, 23 aa, Artificial Sequence
  Description of Artificial Sequence: Synthetic peptide
  MOD_RES (4)..(4): phosphoserine
SVVSGSEMSGKYFFRKNWLRLTW

SEQ ID NO: 3784 - protein, 22 aa, Artificial Sequence
  Description of Artificial Sequence: Synthetic peptide
  MOD_RES (4)..(4): phosphoserine
SVYSPSGPVNRFFRKNWLRLTW

SEQ ID NO: 3785 - protein, 22 aa, Artificial Sequence
  Description of Artificial Sequence: Synthetic peptide
  MOD_RES (6)..(6): phosphoserine
SVYSPSGPVNRFFRKNWLRLTW

SEQ ID NO: 3786 - protein, 21 aa, Artificial Sequence
  Description of Artificial Sequence: Synthetic peptide
  MOD_RES (4)..(4): phosphoserine
SYPSPVPTSFFFRKNWLRLTW

SEQ ID NO: 3787 - protein, 24 aa, Artificial Sequence
  Description of Artificial Sequence: Synthetic peptide
  MOD_RES (11)..(11): phosphoserine
SYVTTSTRTYSLGFFRKNWLRLTW

SEQ ID NO: 3788 - protein, 22 aa, Artificial Sequence
  Description of Artificial Sequence: Synthetic peptide
  MOD_RES (4)..(4): phosphoserine
SYYSPSIGFSYFFRKNWLRLTW

SEQ ID NO: 3789 - protein, 20 aa, Artificial Sequence
  Description of Artificial Sequence: Synthetic peptide
  MOD_RES (4)..(4): phosphoserine
TAISPPLSVFFRKNWLRLTW

SEQ ID NO: 3790 - protein, 20 aa, Artificial Sequence
  Description of Artificial Sequence: Synthetic peptide
  MOD_RES (8)..(8): phosphoserine
TELPKRLSLFFRKNWLRLTW

SEQ ID NO: 3791 - protein, 24 aa, Artificial Sequence
  Description of Artificial Sequence: Synthetic peptide
  MOD_RES (4)..(4): phosphoserine
  MOD_RES (13)..(13): oxidized tryptophan
TESSPGSRQIQLWFFRKNWLRLTW

SEQ ID NO: 3792 - protein, 24 aa, Artificial Sequence
  Description of Artificial Sequence: Synthetic peptide
  MOD_RES (4)..(4): phosphoserine
TESSPGSRQIQLWFFRKNWLRLTW

SEQ ID NO: 3793 - protein, 20 aa, Artificial Sequence
  Description of Artificial Sequence: Synthetic peptide
  MOD_RES (4)..(4): phosphoserine
TEVSPSRTIFFRKNWLRLTW

SEQ ID NO: 3794 - protein, 21 aa, Artificial Sequence
  Description of Artificial Sequence: Synthetic peptide
  MOD_RES (7)..(7): phosphoserine
THALPESPRLFFRKNWLRLTW

SEQ ID NO: 3795 - protein, 19 aa, Artificial Sequence
  Description of Artificial Sequence: Synthetic peptide
  MOD_RES (4)..(4): phosphoserine
  MOD_RES (7)..(7): cysteinylated cysteine
THDSPFCLFFRKNWLRLTW

SEQ ID NO: 3796 - protein, 20 aa, Artificial Sequence
  Description of Artificial Sequence: Synthetic peptide
  MOD_RES (4)..(4): phosphoserine
THISPNAIFFFRKNWLRLTW

SEQ ID NO: 3797 - protein, 22 aa, Artificial Sequence
  Description of Artificial Sequence: Synthetic peptide
  MOD_RES (4)..(4): phosphoserine
THISPNAIFKAFFRKNWLRLTW

SEQ ID NO: 3798 - protein, 21 aa, Artificial Sequence
  Description of Artificial Sequence: Synthetic peptide
  MOD_RES (4)..(4): phosphoserine
TIFSPEGRLYFFRKNWLRLTW

SEQ ID NO: 3799 - protein, 20 aa, Artificial Sequence
  Description of Artificial Sequence: Synthetic peptide
  MOD_RES (3)..(3): oxidized methionine
  MOD_RES (4)..(4): phosphoserine
TIMSPAVLKFFRKNWLRLTW

SEQ ID NO: 3800 - protein, 20 aa, Artificial Sequence
  Description of Artificial Sequence: Synthetic peptide
  MOD_RES (4)..(4): phosphoserine
TIMSPAVLKFFRKNWLRLTW

SEQ ID NO: 3801 - protein, 20 aa, Artificial Sequence
  Description of Artificial Sequence: Synthetic peptide
  MOD_RES (6)..(6): phosphothreonine
TIRSPTTVLFFRKNWLRLTW

SEQ ID NO: 3802 - protein, 20 aa, Artificial Sequence
  Description of Artificial Sequence: Synthetic peptide
  MOD_RES (4)..(4): phosphoserine
TLASPSVFKFFRKNWLRLTW

SEQ ID NO: 3803 - protein, 20 aa, Artificial Sequence
  Description of Artificial Sequence: Synthetic peptide
  MOD_RES (5)..(5): phosphoserine
  MOD_RES (7)..(7): oxidized methionine
TLLASPMLKFFRKNWLRLTW

SEQ ID NO: 3804 - protein, 22 aa, Artificial Sequence
  Description of Artificial Sequence: Synthetic peptide
  MOD_RES (4)..(4): phosphoserine
TLLSAAHEVELFFRKNWLRLTW

SEQ ID NO: 3805 - protein, 20 aa, Artificial Sequence
  Description of Artificial Sequence: Synthetic peptide
  MOD_RES (4)..(4): phosphoserine
TLLSPKHKYFFRKNWLRLTW

SEQ ID NO: 3806 - protein, 22 aa, Artificial Sequence
  Description of Artificial Sequence: Synthetic peptide
  MOD_RES (4)..(4): phosphoserine
TLPSPDKLPGFFFRKNWLRLTW

SEQ ID NO: 3807 - protein, 21 aa, Artificial Sequence
  Description of Artificial Sequence: Synthetic peptide
  MOD_RES (7)..(7): phosphothreonine
TLSCPVTEVIFFRKNWLRLTW

SEQ ID NO: 3808 - protein, 20 aa, Artificial Sequence
  Description of Artificial Sequence: Synthetic peptide
  MOD_RES (3)..(3): phosphoserine
TLSSIRHMIFFRKNWLRLTW

SEQ ID NO: 3809 - protein, 20 aa, Artificial Sequence
  Description of Artificial Sequence: Synthetic peptide
  MOD_RES (4)..(4): phosphoserine
  MOD_RES (8)..(8): oxidized methionine
TLSSIRHMIFFRKNWLRLTW

SEQ ID NO: 3810 - protein, 20 aa, Artificial Sequence
  Description of Artificial Sequence: Synthetic peptide
  MOD_RES (4)..(4): phosphoserine
TLSSIRHMIFFRKNWLRLTW

SEQ ID NO: 3811 - protein, 20 aa, Artificial Sequence
  Description of Artificial Sequence: Synthetic peptide
  MOD_RES (8)..(8): phosphoserine
TLYPRSFSVFFRKNWLRLTW

SEQ ID NO: 3812 - protein, 20 aa, Artificial Sequence
  Description of Artificial Sequence: Synthetic peptide
  MOD_RES (2)..(2): oxidized methionine
  MOD_RES (8)..(8): phosphoserine
TMFLRETSLFFRKNWLRLTW

SEQ ID NO: 3813 - protein, 20 aa, Artificial Sequence
  Description of Artificial Sequence: Synthetic peptide
  MOD_RES (7)..(7): phosphothreonine
TMFLRETSLFFRKNWLRLTW

SEQ ID NO: 3814 - protein, 20 aa, Artificial Sequence
  Description of Artificial Sequence: Synthetic peptide
  MOD_RES (8)..(8): phosphoserine
TMFLRETSLFFRKNWLRLTW

SEQ ID NO: 3815 - protein, 23 aa, Artificial Sequence
  Description of Artificial Sequence: Synthetic peptide
  MOD_RES (2)..(2): oxidized methionine
  MOD_RES (4)..(4): phosphoserine
TMLSPREKIFYYFFRKNWLRLTW

SEQ ID NO: 3816 - protein, 23 aa, Artificial Sequence
  Description of Artificial Sequence: Synthetic peptide
  MOD_RES (4)..(4): phosphoserine
TMLSPREKIFYYFFRKNWLRLTW

SEQ ID NO: 3817 - protein, 27 aa, Artificial Sequence
  Description of Artificial Sequence: Synthetic peptide
  MOD_RES (9)..(9): phosphoserine
TPAGSARGSPTRPNPPFFRKNWLRLTW

SEQ ID NO: 3818 - protein, 20 aa, Artificial Sequence
  Description of Artificial Sequence: Synthetic peptide
  MOD_RES (4)..(4): phosphothreonine
TPHTPKSLLFFRKNWLRLTW

SEQ ID NO: 3819 - protein, 25 aa, Artificial Sequence
  Description of Artificial Sequence: Synthetic peptide
  MOD_RES (4)..(4): phosphoserine
  MOD_RES (11)..(11): oxidized methionine
TPISPGRASGMTTLFFRKNWLRLTW

SEQ ID NO: 3820 - protein, 25 aa, Artificial Sequence
  Description of Artificial Sequence: Synthetic peptide
  MOD_RES (4)..(4): phosphoserine
TPISPGRASGMTTLFFRKNWLRLTW

SEQ ID NO: 3821 - protein, 23 aa, Artificial Sequence
  Description of Artificial Sequence: Synthetic peptide
  MOD_RES (1)..(1): phosphothreonine
TPPSSEKLVSVMFFRKNWLRLTW

SEQ ID NO: 3822 - protein, 21 aa, Artificial Sequence
  Description of Artificial Sequence: Synthetic peptide
  MOD_RES (5)..(5): phosphoserine
TPQPSKDTLLFFRKNWLRLTW

SEQ ID NO: 3823 - protein, 20 aa, Artificial Sequence
  Description of Artificial Sequence: Synthetic peptide
  MOD_RES (3)..(3): phosphoserine
TPSPARPALFFRKNWLRLTW

SEQ ID NO: 3824 - protein, 19 aa, Artificial Sequence
  Description of Artificial Sequence: Synthetic peptide
  MOD_RES (4)..(4): phosphoserine
TPVSPVKFFFRKNWLRLTW

SEQ ID NO: 3825 - protein, 20 aa, Artificial Sequence
  Description of Artificial Sequence: Synthetic peptide
  MOD_RES (6)..(6): phosphoserine
TQRKFSLQFFFRKNWLRLTW

SEQ ID NO: 3826 - protein, 20 aa, Artificial Sequence
  Description of Artificial Sequence: Synthetic peptide
  MOD_RES (4)..(4): phosphoserine
TRDSLLIHLFFRKNWLRLTW

SEQ ID NO: 3827 - protein, 20 aa, Artificial Sequence
  Description of Artificial Sequence: Synthetic peptide
  MOD_RES (4)..(4): phosphothreonine
TSETPQPPRFFRKNWLRLTW

SEQ ID NO: 3828 - protein, 20 aa, Artificial Sequence
  Description of Artificial Sequence: Synthetic peptide
  MOD_RES (4)..(4): phosphoserine
TSISPALARFFRKNWLRLTW

SEQ ID NO: 3829 - protein, 23 aa, Artificial Sequence
  Description of Artificial Sequence: Synthetic peptide
  MOD_RES (5)..(5): phosphoserine
TSVGSPSNTIGRFFRKNWLRLTW

SEQ ID NO: 3830 - protein, 23 aa, Artificial Sequence
  Description of Artificial Sequence: Synthetic peptide
  MOD_RES (11)..(11): phosphoserine
TSYNSISSVVSRFFRKNWLRLTW

SEQ ID NO: 3831 - protein, 24 aa, Artificial Sequence
  Description of Artificial Sequence: Synthetic peptide
  MOD_RES (9)..(9): phosphoserine
TTEVIRKGSITEYFFRKNWLRLTW

SEQ ID NO: 3832 - protein, 20 aa, Artificial Sequence
  Description of Artificial Sequence: Synthetic peptide
  MOD_RES (1)..(1): phosphothreonine
TTGSPTEFLFFRKNWLRLTW

SEQ ID NO: 3833 - protein, 20 aa, Artificial Sequence
  Description of Artificial Sequence: Synthetic peptide
  MOD_RES (2)..(2): phosphothreonine
TTGSPTEFLFFRKNWLRLTW

SEQ ID NO: 3834 - protein, 20 aa, Artificial Sequence
  Description of Artificial Sequence: Synthetic peptide
  MOD_RES (4)..(4): phosphoserine
TTGSPTEFLFFRKNWLRLTW

SEQ ID NO: 3835 - protein, 21 aa, Artificial Sequence
  Description of Artificial Sequence: Synthetic peptide
  MOD_RES (4)..(4): phosphoserine
TVFSPDGHLFFFRKNWLRLTW

SEQ ID NO: 3836 - protein, 21 aa, Artificial Sequence
  Description of Artificial Sequence: Synthetic peptide
  MOD_RES (6)..(6): phosphothreonine
TVFSPTLPAAFFRKNWLRLTW

SEQ ID NO: 3837 - protein, 22 aa, Artificial Sequence
  Description of Artificial Sequence: Synthetic peptide
  MOD_RES (4)..(4): phosphoserine
TVFSPTLPAARFFRKNWLRLTW

SEQ ID NO: 3838 - protein, 20 aa, Artificial Sequence
  Description of Artificial Sequence: Synthetic peptide
  MOD_RES (4)..(4): phosphothreonine
TVFTPVEEKFFRKNWLRLTW

SEQ ID NO: 3839 - protein, 20 aa, Artificial Sequence
  Description of Artificial Sequence: Synthetic peptide
  MOD_RES (8)..(8): phosphoserine
TVKQKYLSFFFRKNWLRLTW

SEQ ID NO: 3840 - protein, 20 aa, Artificial Sequence
  Description of Artificial Sequence: Synthetic peptide
  MOD_RES (4)..(4): phosphoserine
TVNSPAIYKFFRKNWLRLTW

SEQ ID NO: 3841 - protein, 21 aa, Artificial Sequence
  Description of Artificial Sequence: Synthetic peptide
  MOD_RES (4)..(4): phosphoserine
TVNSPAIYKFFFRKNWLRLTW

SEQ ID NO: 3842 - protein, 22 aa, Artificial Sequence
  Description of Artificial Sequence: Synthetic peptide
  MOD_RES (4)..(4): phosphothreonine
TVSTPPPFQGRFFRKNWLRLTW

SEQ ID NO: 3843 - protein, 20 aa, Artificial Sequence
  Description of Artificial Sequence: Synthetic peptide
  MOD_RES (3)..(3): phosphoserine
TVSTVGISIFFRKNWLRLTW

SEQ ID NO: 3844 - protein, 21 aa, Artificial Sequence
  Description of Artificial Sequence: Synthetic peptide
  MOD_RES (4)..(4): phosphoserine
TVVSPRALELFFRKNWLRLTW

SEQ ID NO: 3845 - protein, 23 aa, Artificial Sequence
  Description of Artificial Sequence: Synthetic peptide
  MOD_RES (5)..(5): phosphoserine
TVYSSEEAELLKFFRKNWLRLTW

SEQ ID NO: 3846 - protein, 21 aa, Artificial Sequence
  Description of Artificial Sequence: Synthetic peptide
  MOD_RES (9)..(9): phosphoserine
TYDDRAYSSFFFRKNWLRLTW

SEQ ID NO: 3847 - protein, 21 aa, Artificial Sequence
  Description of Artificial Sequence: Synthetic peptide
  MOD_RES (4)..(4): phosphoserine
TYVSSFYHAFFFRKNWLRLTW

SEQ ID NO: 3848 - protein, 22 aa, Artificial Sequence
  Description of Artificial Sequence: Synthetic peptide
  MOD_RES (6)..(6): phosphoserine
VAKRNSLKELWFFRKNWLRLTW

SEQ ID NO: 3849 - protein, 20 aa, Artificial Sequence
  Description of Artificial Sequence: Synthetic peptide
  MOD_RES (4)..(4): phosphoserine
VARSPLKEFFFRKNWLRLTW

SEQ ID NO: 3850 - protein, 20 aa, Artificial Sequence
  Description of Artificial Sequence: Synthetic peptide
  MOD_RES (4)..(4): phosphoserine
VEHSPFSSFFFRKNWLRLTW

SEQ ID NO: 3851 - protein, 20 aa, Artificial Sequence
  Description of Artificial Sequence: Synthetic peptide
  MOD_RES (4)..(4): phosphoserine
  MOD_RES (9)..(9): oxidized tryptophan
VELSPARSWFFRKNWLRLTW

SEQ ID NO: 3852 - protein, 20 aa, Artificial Sequence
  Description of Artificial Sequence: Synthetic peptide
  MOD_RES (4)..(4): phosphoserine
VELSPARSWFFRKNWLRLTW

SEQ ID NO: 3853 - protein, 23 aa, Artificial Sequence
  Description of Artificial Sequence: Synthetic peptide
  MOD_RES (4)..(4): phosphoserine
VELSPLKGSVSWFFRKNWLRLTW

SEQ ID NO: 3854 - protein, 21 aa, Artificial Sequence
  Description of Artificial Sequence: Synthetic peptide
  MOD_RES (4)..(4): phosphoserine
VETSFRKLSFFFRKNWLRLTW

SEQ ID NO: 3855 - protein, 21 aa, Artificial Sequence
  Description of Artificial Sequence: Synthetic peptide
  MOD_RES (9)..(9): phosphoserine
VETSFRKLSFFFRKNWLRLTW

SEQ ID NO: 3856 - protein, 20 aa, Artificial Sequence
  Description of Artificial Sequence: Synthetic peptide
  MOD_RES (4)..(4): phosphoserine
VIDSQELSKFFRKNWLRLTW

SEQ ID NO: 3857 - protein, 20 aa, Artificial Sequence
  Description of Artificial Sequence: Synthetic peptide
  MOD_RES (4)..(4): phosphoserine
VIKSPSWQRFFRKNWLRLTW

SEQ ID NO: 3858 - protein, 20 aa, Artificial Sequence
  Description of Artificial Sequence: Synthetic peptide
  MOD_RES (3)..(3): oxidized methionine
  MOD_RES (4)..(4): phosphoserine
VIMSIRTKLFFRKNWLRLTW

SEQ ID NO: 3859 - protein, 20 aa, Artificial Sequence
  Description of Artificial Sequence: Synthetic peptide
  MOD_RES (4)..(4): phosphoserine
VIMSIRTKLFFRKNWLRLTW

SEQ ID NO: 3860 - protein, 21 aa, Artificial Sequence
  Description of Artificial Sequence: Synthetic peptide
  MOD_RES (4)..(4): phosphoserine
VLASPLKTGRFFRKNWLRLTW

SEQ ID NO: 3861 - protein, 20 aa, Artificial Sequence
  Description of Artificial Sequence: Synthetic peptide
  MOD_RES (5)..(5): phosphoserine
  MOD_RES (9)..(9): oxidized methionine
VLFSSPPQMFFRKNWLRLTW

SEQ ID NO: 3862 - protein, 22 aa, Artificial Sequence
  Description of Artificial Sequence: Synthetic peptide
  MOD_RES (4)..(4): phosphoserine
VLGSQEALHPVFFRKNWLRLTW

SEQ ID NO: 3863 - protein, 20 aa, Artificial Sequence
  Description of Artificial Sequence: Synthetic peptide
  MOD_RES (8)..(8): phosphoserine
VLPSQVYSLFFRKNWLRLTW

SEQ ID NO: 3864 - protein, 19 aa, Artificial Sequence
  Description of Artificial Sequence: Synthetic peptide
  MOD_RES (2)..(2): oxidized methionine
  MOD_RES (4)..(4): phosphoserine
VMDSPVHLFFRKNWLRLTW

SEQ ID NO: 3865 - protein, 21 aa, Artificial Sequence
  Description of Artificial Sequence: Synthetic peptide
  MOD_RES (2)..(2): oxidized methionine
  MOD_RES (5)..(5): phosphothreonine
VMFRTPLASVFFRKNWLRLTW

SEQ ID NO: 3866 - protein, 21 aa, Artificial Sequence
  Description of Artificial Sequence: Synthetic peptide
  MOD_RES (7)..(7): phosphoserine
VPFKRLSVVFFFRKNWLRLTW

SEQ ID NO: 3867 - protein, 23 aa, Artificial Sequence
  Description of Artificial Sequence: Synthetic peptide
  MOD_RES (8)..(8): phosphoserine
VPKGPIHSPVELFFRKNWLRLTW

SEQ ID NO: 3868 - protein, 20 aa, Artificial Sequence
  Description of Artificial Sequence: Synthetic peptide
  MOD_RES (8)..(8): phosphoserine
VPKKPPPSPFFRKNWLRLTW

SEQ ID NO: 3869 - protein, 20 aa, Artificial Sequence
  Description of Artificial Sequence: Synthetic peptide
  MOD_RES (8)..(8): phosphoserine
VPNEEDPSLFFRKNWLRLTW

SEQ ID NO: 3870 - protein, 22 aa, Artificial Sequence
  Description of Artificial Sequence: Synthetic peptide
  MOD_RES (4)..(4): phosphoserine
VPRSPFKVKVLFFRKNWLRLTW

SEQ ID NO: 3871 - protein, 20 aa, Artificial Sequence
  Description of Artificial Sequence: Synthetic peptide
  MOD_RES (4)..(4): phosphoserine
VPRSPVIKIFFRKNWLRLTW

SEQ ID NO: 3872 - protein, 20 aa, Artificial Sequence
  Description of Artificial Sequence: Synthetic peptide
  MOD_RES (4)..(4): phosphothreonine
VPRTPVGKFFFRKNWLRLTW

SEQ ID NO: 3873 - protein, 20 aa, Artificial Sequence
  Description of Artificial Sequence: Synthetic peptide
  MOD_RES (4)..(4): phosphoserine
VPSSPLRKAFFRKNWLRLTW

SEQ ID NO: 3874 - protein, 21 aa, Artificial Sequence
  Description of Artificial Sequence: Synthetic peptide
  MOD_RES (4)..(4): phosphoserine
VPTSPKGRLLFFRKNWLRLTW

SEQ ID NO: 3875 - protein, 20 aa, Artificial Sequence
  Description of Artificial Sequence: Synthetic peptide
  MOD_RES (4)..(4): phosphoserine
VRKSRAWVLFFRKNWLRLTW

SEQ ID NO: 3876 - protein, 20 aa, Artificial Sequence
  Description of Artificial Sequence: Synthetic peptide
  MOD_RES (8)..(8): phosphoserine
VRTPSVQSLFFRKNWLRLTW

SEQ ID NO: 3877 - protein, 21 aa, Artificial Sequence
  Description of Artificial Sequence: Synthetic peptide
  MOD_RES (4)..(4): phosphoserine
VSFSPTDHSLFFRKNWLRLTW

SEQ ID NO: 3878 - protein, 20 aa, Artificial Sequence
  Description of Artificial Sequence: Synthetic peptide
  MOD_RES (4)..(4): phosphoserine
VSSSPRELLFFRKNWLRLTW

SEQ ID NO: 3879 - protein, 21 aa, Artificial Sequence
  Description of Artificial Sequence: Synthetic peptide
  MOD_RES (4)..(4): phosphoserine
VVSSPKLAPKFFRKNWLRLTW

SEQ ID NO: 3880 - protein, 23 aa, Artificial Sequence
  Description of Artificial Sequence: Synthetic peptide
  MOD_RES (5)..(5): oxidized methionine
  MOD_RES (6)..(6): phosphoserine
VYIPMSPGAHHFFFRKNWLRLTW

SEQ ID NO: 3881 - protein, 23 aa, Artificial Sequence
  Description of Artificial Sequence: Synthetic peptide
  MOD_RES (6)..(6): phosphoserine
VYIPMSPGAHHFFFRKNWLRLTW

SEQ ID NO: 3882 - protein, 20 aa, Artificial Sequence
  Description of Artificial Sequence: Synthetic peptide
  MOD_RES (7)..(7): phosphothreonine
VYLPTHTSLFFRKNWLRLTW

SEQ ID NO: 3883 - protein, 20 aa, Artificial Sequence
  Description of Artificial Sequence: Synthetic peptide
  MOD_RES (8)..(8): phosphoserine
VYLPTHTSLFFRKNWLRLTW

SEQ ID NO: 3884 - protein, 21 aa, Artificial Sequence
  Description of Artificial Sequence: Synthetic peptide
  MOD_RES (7)..(7): phosphothreonine
VYLPTHTSLLFFRKNWLRLTW

SEQ ID NO: 3885 - protein, 21 aa, Artificial Sequence
  Description of Artificial Sequence: Synthetic peptide
  MOD_RES (8)..(8): phosphoserine
VYLPTHTSLLFFRKNWLRLTW

SEQ ID NO: 3886 - protein, 20 aa, Artificial Sequence
  Description of Artificial Sequence: Synthetic peptide
  MOD_RES (4)..(4): phosphoserine
VYTSVQAQYFFRKNWLRLTW

SEQ ID NO: 3887 - protein, 22 aa, Artificial Sequence
  Description of Artificial Sequence: Synthetic peptide
  MOD_RES (7)..(7): phosphothreonine
WEDRPSTPTILFFRKNWLRLTW

SEQ ID NO: 3888 - protein, 20 aa, Artificial Sequence
  Description of Artificial Sequence: Synthetic peptide
  MOD_RES (8)..(8): phosphoserine
WEFGKRDSLFFRKNWLRLTW

SEQ ID NO: 3889 - protein, 21 aa, Artificial Sequence
  Description of Artificial Sequence: Synthetic peptide
  MOD_RES (4)..(4): phosphoserine
WPRSPGRAFLFFRKNWLRLTW

SEQ ID NO: 3890 - protein, 21 aa, Artificial Sequence
  Description of Artificial Sequence: Synthetic peptide
  MOD_RES (5)..(5): phosphoserine
WVIGSPEILRFFRKNWLRLTW

SEQ ID NO: 3891 - protein, 20 aa, Artificial Sequence
  Description of Artificial Sequence: Synthetic peptide
  MOD_RES (4)..(4): phosphoserine
YAFSPKIGRFFRKNWLRLTW

SEQ ID NO: 3892 - protein, 20 aa, Artificial Sequence
  Description of Artificial Sequence: Synthetic peptide
  MOD_RES (1)..(1): phosphotyrosine
YEKIHLDFLFFRKNWLRLTW

SEQ ID NO: 3893 - protein, 21 aa, Artificial Sequence
  Description of Artificial Sequence: Synthetic peptide
  MOD_RES (7)..(7): phosphoserine
YEVEPYSPGLFFRKNWLRLTW

SEQ ID NO: 3894 - protein, 20 aa, Artificial Sequence
  Description of Artificial Sequence: Synthetic peptide
  MOD_RES (4)..(4): phosphoserine
YHLSPRAFLFFRKNWLRLTW

SEQ ID NO: 3895 - protein, 21 aa, Artificial Sequence
  Description of Artificial Sequence: Synthetic peptide
  MOD_RES (6)..(6): phosphoserine
YILDSSPEKLFFRKNWLRLTW

SEQ ID NO: 3896 - protein, 22 aa, Artificial Sequence
  Description of Artificial Sequence: Synthetic peptide
  MOD_RES (4)..(4): phosphoserine
YLRSVGDGETVFFRKNWLRLTW

SEQ ID NO: 3897 - protein, 22 aa, Artificial Sequence
  Description of Artificial Sequence: Synthetic peptide
  MOD_RES (4)..(4): phosphoserine
YLVSPITGEKIFFRKNWLRLTW

SEQ ID NO: 3898 - protein, 20 aa, Artificial Sequence
  Description of Artificial Sequence: Synthetic peptide
  MOD_RES (6)..(6): phosphoserine
YPDPHSPFAFFRKNWLRLTW

SEQ ID NO: 3899 - protein, 23 aa, Artificial Sequence
  Description of Artificial Sequence: Synthetic peptide
  MOD_RES (6)..(6): phosphoserine
YPFLDSPNKYSLFFRKNWLRLTW

SEQ ID NO: 3900 - protein, 20 aa, Artificial Sequence
  Description of Artificial Sequence: Synthetic peptide
  MOD_RES (8)..(8): phosphoserine
YPSFRRSSLFFRKNWLRLTW

SEQ ID NO: 3901 - protein, 20 aa, Artificial Sequence
  Description of Artificial Sequence: Synthetic peptide
  MOD_RES (3)..(3): phosphothreonine
YPTPYPDELFFRKNWLRLTW

SEQ ID NO: 3902 - protein, 23 aa, Artificial Sequence
  Description of Artificial Sequence: Synthetic peptide
  MOD_RES (4)..(4): phosphoserine
YQLSPTKLPSINFFRKNWLRLTW

SEQ ID NO: 3903 - protein, 21 aa, Artificial Sequence
  Description of Artificial Sequence: Synthetic peptide
  MOD_RES (8)..(8): phosphoserine
YQRPFSPSAYFFRKNWLRLTW

SEQ ID NO: 3904 - protein, 21 aa, Artificial Sequence
  Description of Artificial Sequence: Synthetic peptide
  MOD_RES (4)..(4): phosphoserine
YQYSDQGIDYFFRKNWLRLTW

SEQ ID NO: 3905 - protein, 21 aa, Artificial Sequence
  Description of Artificial Sequence: Synthetic peptide
  MOD_RES (4)..(4): phosphoserine
YRLSPEPTPLFFRKNWLRLTW

SEQ ID NO: 3906 - protein, 20 aa, Artificial Sequence
  Description of Artificial Sequence: Synthetic peptide
  MOD_RES (4)..(4): phosphoserine
YRPSYSYDYFFRKNWLRLTW

SEQ ID NO: 3907 - protein, 23 aa, Artificial Sequence
  Description of Artificial Sequence: Synthetic peptide
  MOD_RES (4)..(4): phosphoserine
YRPSYSYDYEFDFFRKNWLRLTW

SEQ ID NO: 3908 - protein, 21 aa, Artificial Sequence
  Description of Artificial Sequence: Synthetic peptide
  MOD_RES (9)..(9): phosphoserine
YRYDGQHFSLFFRKNWLRLTW

SEQ ID NO: 3909 - protein, 20 aa, Artificial Sequence
  Description of Artificial Sequence: Synthetic peptide
  MOD_RES (4)..(4): phosphoserine
YRYSLEKALFFRKNWLRLTW

SEQ ID NO: 3910 - protein, 24 aa, Artificial Sequence
  Description of Artificial Sequence: Synthetic peptide
  MOD_RES (5)..(5): phosphoserine
  MOD_RES (11)..(11): oxidized methionine
YSLDSPGPEKMALFFRKNWLRLTW

SEQ ID NO: 3911 - protein, 24 aa, Artificial Sequence
  Description of Artificial Sequence: Synthetic peptide
  MOD_RES (5)..(5): phosphoserine
YSLDSPGPEKMALFFRKNWLRLTW

SEQ ID NO: 3912 - protein, 22 aa, Artificial Sequence
  Description of Artificial Sequence: Synthetic peptide
  MOD_RES (4)..(4): phosphoserine
YSLSPSKSYKYFFRKNWLRLTW

SEQ ID NO: 3913 - protein, 20 aa, Artificial Sequence
  Description of Artificial Sequence: Synthetic peptide
  MOD_RES (3)..(3): oxidized methionine
  MOD_RES (4)..(4): phosphoserine
YSMSPGAMRFFRKNWLRLTW

SEQ ID NO: 3914 - protein, 20 aa, Artificial Sequence
  Description of Artificial Sequence: Synthetic peptide
  MOD_RES (4)..(4): phosphoserine
  MOD_RES (8)..(8): oxidized methionine
YSMSPGAMRFFRKNWLRLTW

SEQ ID NO: 3915 - protein, 20 aa, Artificial Sequence
  Description of Artificial Sequence: Synthetic peptide
  MOD_RES (4)..(4): phosphoserine
YSMSPGAMRFFRKNWLRLTW

SEQ ID NO: 3916 - protein, 20 aa, Artificial Sequence
  Description of Artificial Sequence: Synthetic peptide
  MOD_RES (8)..(8): phosphoserine
YVKLTPVSLFFRKNWLRLTW

SEQ ID NO: 3917 - protein, 20 aa, Artificial Sequence
  Description of Artificial Sequence: Synthetic peptide
  MOD_RES (4)..(4): phosphoserine
YVSSPDPQLFFRKNWLRLTW

SEQ ID NO: 3918 - protein, 21 aa, Artificial Sequence
  Description of Artificial Sequence: Synthetic peptide
  MOD_RES (4)..(4): phosphoserine
YYFSPSGKKFFFRKNWLRLTW

SEQ ID NO: 3919 - protein, 20 aa, Artificial Sequence
  Description of Artificial Sequence: Synthetic peptide
  MOD_RES (1)..(1): phosphotyrosine
YYISPRITFFFRKNWLRLTW

SEQ ID NO: 3920 - protein, 645 aa, Artificial Sequence
  Description of Artificial Sequence: Synthetic polypeptide
SKGPAVGIDLGTTYSCVGVFQHGKVEIIANDQGNRTTPSYVAFTDTERLIGDAAKNQVAMNPTNTVFDAKRLIGRRFDDAVVQSDMKHWPFMVVNDAGRPKVQVEYKGETKSFYPEEVSSMVLTKMKEIAEAYLGKTVTNAVVTVPAYFNDSQRQATKDAGTIAGLNVLRIINEPTAAAIAYGLDKKVGAERNVLIFDLGGGTFDVSILTIEDGIFEVKSTAGDTHLGGEDFDNRMVNHFIAEFKRKHKKDISENKRAVRRLRTACERAKRTLSSSTQASIEIDSLYEGIDFYTSITRARFEELNADLFRGTLDPVEKALRDAKLDKSQIHDIVLVGGSTRIPKIQKLLQDFFNGKELNKSINPDEAVAYGAAVQAAILSGDKSENVQDLLLLDVTPLSLGIETAGGVMTVLIKRNTTIPTKQTQTFTTYSDNQPGVLIQVYEGERAMTKDNNLLGKFELTGIPPAPRGVPQIEVTFDIDANGILNVSAVDKSTGKENKITITNDKGRLSKEDIERMVQEAEKYKAEDEKQRDKVSSKNSLESYAFNMKATVEDEKLQGKINDEDKQKILDKCNEIINWLDKNQTAEKEEFEHQQKELEKVCNPIITKLYQSAGGMPGGMPGGFPGGGAPPSGGASSGPTIEEVD

SEQ ID NO: 3921 - protein, 10 aa, Artificial Sequence
  Description of Artificial Sequence: Synthetic peptide
  MOD_RES (4)..(4): phosphoserine
DIASLVGHEF

SEQ ID NO: 3922 - protein, 9 aa, Artificial Sequence
  Description of Artificial Sequence: Synthetic peptide
  MOD_RES (4)..(4): phosphoserine
DIVSEYTHY

SEQ ID NO: 3923 - protein, 11 aa, Artificial Sequence
  Description of Artificial Sequence: Synthetic peptide
  MOD_RES (9)..(9): phosphoserine
DSADLPPPSAL

SEQ ID NO: 3924 - protein, 15 aa, Artificial Sequence
  Description of Artificial Sequence: Synthetic peptide
  MOD_RES (5)..(5): phosphoserine
DVIDSQELSKVSREF

SEQ ID NO: 3925 - protein, 10 aa, Artificial Sequence
  Description of Artificial Sequence: Synthetic peptide
  MOD_RES (6)..(6): phosphoserine
ETRSPSPISI

SEQ ID NO: 3926 - protein, 9 aa, Artificial Sequence
  Description of Artificial Sequence: Synthetic peptide
  MOD_RES (3)..(3): oxidized methionine
  MOD_RES (8)..(8): phosphoserine
FKMIRSQSL

SEQ ID NO: 3927 - protein, 9 aa, Artificial Sequence
  Description of Artificial Sequence: Synthetic peptide
  MOD_RES (4)..(4): phosphoserine
GAVSPGALR

SEQ ID NO: 3928 - protein, 10 aa, Artificial Sequence
  Description of Artificial Sequence: Synthetic peptide
  MOD_RES (4)..(4): phosphoserine
GLPSPRGPGL

SEQ ID NO: 3929 - protein, 10 aa, Artificial Sequence
  Description of Artificial Sequence: Synthetic peptide
  MOD_RES (5)..(5): phosphoserine
GRILSGVVTK

SEQ ID NO: 3930 - protein, 14 aa, Artificial Sequence
  Description of Artificial Sequence: Synthetic peptide
  MOD_RES (8)..(8): phosphoserine
GRMIRAESGPDLRY

SEQ ID NO: 3931 - protein, 14 aa, Artificial Sequence
  Description of Artificial Sequence: Synthetic peptide
  MOD_RES (3)..(3): oxidized methionine
  MOD_RES (8)..(8): phosphoserine
GRMIRAESGPDLRY

SEQ ID NO: 3932 - protein, 9 aa, Artificial Sequence
  Description of Artificial Sequence: Synthetic peptide
  MOD_RES (5)..(5): phosphothreonine
HPDGTPPKL

SEQ ID NO: 3933 - protein, 9 aa, Artificial Sequence
  Description of Artificial Sequence: Synthetic peptide
  MOD_RES (8)..(8): phosphoserine
HPHLRKVSV

SEQ ID NO: 3934 - protein, 11 aa, Artificial Sequence
  Description of Artificial Sequence: Synthetic peptide
  MOD_RES (7)..(7): phosphoserine
HRRIDISPSTL

SEQ ID NO: 3935 - protein, 9 aa, Artificial Sequence
  Description of Artificial Sequence: Synthetic peptide
  MOD_RES (3)..(3): phosphoserine
KASSLISLL

SEQ ID NO: 3936 - protein, 9 aa, Artificial Sequence
  Description of Artificial Sequence: Synthetic peptide
  MOD_RES (4)..(4): phosphoserine
KASSLISLL

SEQ ID NO: 3937 - protein, 11 aa, Artificial Sequence
  Description of Artificial Sequence: Synthetic peptide
  MOD_RES (4)..(4): phosphoserine
KIPSAVSTVSM

SEQ ID NO: 3938 - protein, 13 aa, Artificial Sequence
  Description of Artificial Sequence: Synthetic peptide
  MOD_RES (4)..(4): phosphoserine
KRFSMVVQDGIVK

SEQ ID NO: 3939 - protein, 13 aa, Artificial Sequence
  Description of Artificial Sequence: Synthetic peptide
  MOD_RES (4)..(4): phosphoserine
  MOD_RES (5)..(5): oxidized methionine
KRFSMVVQDGIVK

SEQ ID NO: 3940 - protein, 11 aa, Artificial Sequence
  Description of Artificial Sequence: Synthetic peptide
  MOD_RES (5)..(5): phosphothreonine
KRFSTEEFVLL

SEQ ID NO: 3941 - protein, 8 aa, Artificial Sequence
  Description of Artificial Sequence: Synthetic peptide
  MOD_RES (4)..(4): phosphoserine
KRISISTS

SEQ ID NO: 3942 - protein, 9 aa, Artificial Sequence
  Description of Artificial Sequence: Synthetic peptide
  MOD_RES (4)..(4): phosphoserine
KRISISTSG

SEQ ID NO: 3943 - protein, 10 aa, Artificial Sequence
  Description of Artificial Sequence: Synthetic peptide
  MOD_RES (4)..(4): phosphoserine
KRISISTSGG

SEQ ID NO: 3944 - protein, 12 aa, Artificial Sequence
  Description of Artificial Sequence: Synthetic peptide
  MOD_RES (4)..(4): phosphoserine
KRLSLDSSLVEY

SEQ ID NO: 3945 - protein, 11 aa, Artificial Sequence
  Description of Artificial Sequence: Synthetic peptide
  MOD_RES (4)..(4): phosphoserine
KRLSLPADIRL

SEQ ID NO: 3946 - protein, 9 aa, Artificial Sequence
  Description of Artificial Sequence: Synthetic peptide
  MOD_RES (4)..(4): phosphoserine
KRTSKYFSL

SEQ ID NO: 3947 - protein, 11 aa, Artificial Sequence
  Description of Artificial Sequence: Synthetic peptide
  MOD_RES (4)..(4): phosphoserine
LPRSSSMAAGL

SEQ ID NO: 3948 - protein, 11 aa, Artificial Sequence
  Description of Artificial Sequence: Synthetic peptide
  MOD_RES (5)..(5): phosphoserine
LPRSSSMAAGL

SEQ ID NO: 3949 - protein, 10 aa, Artificial Sequence
  Description of Artificial Sequence: Synthetic peptide
  MOD_RES (4)..(4): phosphoserine
LQHSFSFAGF

SEQ ID NO: 3950 - protein, 9 aa, Artificial Sequence
  Description of Artificial Sequence: Synthetic peptide
  MOD_RES (2)..(2): phosphothreonine
LTSKLSTKD

SEQ ID NO: 3951 - protein, 10 aa, Artificial Sequence
  Description of Artificial Sequence: Synthetic peptide
  MOD_RES (9)..(9): phosphoserine
NPTMLRTHSL

SEQ ID NO: 3952 - protein, 9 aa, Artificial Sequence
  Description of Artificial Sequence: Synthetic peptide
  MOD_RES (3)..(3): phosphoserine
NRSSPVHII

SEQ ID NO: 3953 - protein, 10 aa, Artificial Sequence
  Description of Artificial Sequence: Synthetic peptide
  MOD_RES (6)..(6): phosphothreonine
QVLPKTVKLF

SEQ ID NO: 3954 - protein, 12 aa, Artificial Sequence
  Description of Artificial Sequence: Synthetic peptide
  MOD_RES (6)..(6): phosphothreonine
RLPSPTSPFSSL

SEQ ID NO: 3955 - protein, 10 aa, Artificial Sequence
  Description of Artificial Sequence: Synthetic peptide
  MOD_RES (7)..(7): phosphoserine
RPKLHHSLSF

SEQ ID NO: 3956 - protein, 9 aa, Artificial Sequence
  Description of Artificial Sequence: Synthetic peptide
  MOD_RES (4)..(4): phosphoserine
RPRSDSLIL

SEQ ID NO: 3957 - protein, 10 aa, Artificial Sequence
  Description of Artificial Sequence: Synthetic peptide
  MOD_RES (4)..(4): phosphoserine
  MOD_RES (5)..(5): oxidized tryptophan
RQPSWDPSPV

SEQ ID NO: 3958 - protein, 10 aa, Artificial Sequence
  Description of Artificial Sequence: Synthetic peptide
  MOD_RES (4)..(4): phosphoserine
RRASAPLPGL

SEQ ID NO: 3959 - protein, 9 aa, Artificial Sequence
  Description of Artificial Sequence: Synthetic peptide
  MOD_RES (6)..(6): phosphoserine
RRASLSEIG

SEQ ID NO: 3960 - protein, 9 aa, Artificial Sequence
  Description of Artificial Sequence: Synthetic peptide
  MOD_RES (4)..(4): phosphoserine
RRASLSEIG

SEQ ID NO: 3961 - protein, 10 aa, Artificial Sequence
  Description of Artificial Sequence: Synthetic peptide
  MOD_RES (4)..(4): phosphoserine
RRFSADEQFF

SEQ ID NO: 3962 - protein, 10 aa, Artificial Sequence
  Description of Artificial Sequence: Synthetic peptide
  MOD_RES (4)..(4): phosphoserine
RRFSFSANFY

SEQ ID NO: 3963 - protein, 10 aa, Artificial Sequence
  Description of Artificial Sequence: Synthetic peptide
  MOD_RES (4)..(4): phosphoserine
RRFSPPSSSL

SEQ ID NO: 3964 - protein, 8 aa, Artificial Sequence
  Description of Artificial Sequence: Synthetic peptide
  MOD_RES (6)..(6): phosphoserine
RRIDISPS

SEQ ID NO: 3965 - protein, 10 aa, Artificial Sequence
  Description of Artificial Sequence: Synthetic peptide
  MOD_RES (4)..(4): phosphoserine
  MOD_RES (9)..(9): cysteinylated cysteine
RRISIVENCF

SEQ ID NO: 3966 - protein, 11 aa, Artificial Sequence
  Description of Artificial Sequence: Synthetic peptide
  MOD_RES (7)..(7): phosphoserine
RRLPIFSRLSI

SEQ ID NO: 3967 - protein, 10 aa, Artificial Sequence
  Description of Artificial Sequence: Synthetic peptide
  MOD_RES (4)..(4): phosphoserine
RRLSAIFLRL

SEQ ID NO: 3968 - protein, 10 aa, Artificial Sequence
  Description of Artificial Sequence: Synthetic peptide
  MOD_RES (4)..(4): phosphoserine
RRLSFLVSYI

SEQ ID NO: 3969 - protein, 10 aa, Artificial Sequence
  Description of Artificial Sequence: Synthetic peptide
  MOD_RES (4)..(4): phosphoserine
RRLSFTLERL

SEQ ID NO: 3970 - protein, 11 aa, Artificial Sequence
  Description of Artificial Sequence: Synthetic peptide
  MOD_RES (4)..(4): phosphoserine
RRLSIEGNIAV

SEQ ID NO: 3971 - protein, 9 aa, Artificial Sequence
  Description of Artificial Sequence: Synthetic peptide
  MOD_RES (4)..(4): phosphoserine
RRLSPPTLL

SEQ ID NO: 3972 - protein, 9 aa, Artificial Sequence
  Description of Artificial Sequence: Synthetic peptide
  MOD_RES (6)..(6): phosphothreonine
  MOD_RES (7)..(7): oxidized methionine
RSFSPTMKV

SEQ ID NO: 3973 - protein, 9 aa, Artificial Sequence
  Description of Artificial Sequence: Synthetic peptide
  MOD_RES (3)..(3): phosphoserine
RSSSFTFHI

SEQ ID NO: 3974 - protein, 9 aa, Artificial Sequence
  Description of Artificial Sequence: Synthetic peptide
  MOD_RES (4)..(4): phosphoserine
RSSSFTFHI

SEQ ID NO: 3975 - protein, 9 aa, Artificial Sequence
  Description of Artificial Sequence: Synthetic peptide
  MOD_RES (2)..(2): phosphothreonine
RTAATEVSL

SEQ ID NO: 3976 - protein, 9 aa, Artificial Sequence
  Description of Artificial Sequence: Synthetic peptide
  MOD_RES (4)..(4): phosphoserine
RVDSTTCLF

SEQ ID NO: 3977 - protein, 10 aa, Artificial Sequence
  Description of Artificial Sequence: Synthetic peptide
  MOD_RES (4)..(4): phosphoserine
  MOD_RES (7)..(7): cysteinylated cysteine
RVDSTTCLFP

SEQ ID NO: 3978 - protein, 9 aa, Artificial Sequence
  Description of Artificial Sequence: Synthetic peptide
  MOD_RES (4)..(4): phosphoserine
RVPSEHPYL

SEQ ID NO: 3979 - protein, 12 aa, Artificial Sequence
  Description of Artificial Sequence: Synthetic peptide
  MOD_RES (11)..(11): phosphoserine
SAITPSVSRTSF

SEQ ID NO: 3980 - protein, 10 aa, Artificial Sequence
  Description of Artificial Sequence: Synthetic peptide
  MOD_RES (4)..(4): phosphoserine
SEGSEPALLH

SEQ ID NO: 3981 - protein, 11 aa, Artificial Sequence
  Description of Artificial Sequence: Synthetic peptide
  MOD_RES (4)..(4): phosphoserine
SIASPDVKLNL

SEQ ID NO: 3982 - protein, 9 aa, Artificial Sequence
  Description of Artificial Sequence: Synthetic peptide
  MOD_RES (4)..(4): phosphoserine
SIKSDVPVY

SEQ ID NO: 3983 - protein, 9 aa, Artificial Sequence
  Description of Artificial Sequence: Synthetic peptide
  MOD_RES (5)..(5): phosphothreonine
SLALTPPQA

SEQ ID NO: 3984 - protein, 7 aa, Artificial Sequence
  Description of Artificial Sequence: Synthetic peptide
  MOD_RES (4)..(4): phosphoserine
SLKSRLR

SEQ ID NO: 3985 - protein, 10 aa, Artificial Sequence
  Description of Artificial Sequence: Synthetic peptide
  MOD_RES (4)..(4): phosphoserine
SLPSPHPVRY

SEQ ID NO: 3986 - protein, 14 aa, Artificial Sequence
  Description of Artificial Sequence: Synthetic peptide
  MOD_RES (11)..(11): phosphoserine
SPRPSPVPKPSPPL

SEQ ID NO: 3987 - protein, 8 aa, Artificial Sequence
  Description of Artificial Sequence: Synthetic peptide
  MOD_RES (4)..(4): phosphoserine
SRFSSGGA

SEQ ID NO: 3988 - protein, 9 aa, Artificial Sequence
  Description of Artificial Sequence: Synthetic peptide
  MOD_RES (8)..(8): phosphoserine
SRIVRTPSL

SEQ ID NO: 3989 - protein, 10 aa, Artificial Sequence
  Description of Artificial Sequence: Synthetic peptide
  MOD_RES (9)..(9): phosphoserine
SRTSFTSVSR

SEQ ID NO: 3990 - protein, 9 aa, Artificial Sequence
  Description of Artificial Sequence: Synthetic peptide
  MOD_RES (5)..(5): phosphoserine
TMPTSLPNL

SEQ ID NO: 3991 - protein, 12 aa, Artificial Sequence
  Description of Artificial Sequence: Synthetic peptide
  MOD_RES (4)..(4): phosphoserine
TRLSPIAPAPGF

SEQ ID NO: 3992 - protein, 10 aa, Artificial Sequence
  Description of Artificial Sequence: Synthetic peptide
  MOD_RES (4)..(4): phosphoserine
  MOD_RES (8)..(8): oxidized methionine
TSNSQKYMSF

SEQ ID NO: 3993 - protein, 9 aa, Artificial Sequence
  Description of Artificial Sequence: Synthetic peptide
  MOD_RES (8)..(8): phosphoserine
TSTSRYLSL

SEQ ID NO: 3994 - protein, 10 aa, Artificial Sequence
  Description of Artificial Sequence: Synthetic peptide
  MOD_RES (4)..(4): phosphoserine
VKTSGSSDRL

SEQ ID NO: 3995 - protein, 9 aa, Artificial Sequence
  Description of Artificial Sequence: Synthetic peptide
  MOD_RES (4)..(4): phosphoserine
NIKSPALAF

SEQ ID NO: 3996 - protein, 10 aa, Artificial Sequence
  Description of Artificial Sequence: Synthetic peptide
  MOD_RES (2)..(2): phosphoserine
LSPRAVSTTF

SEQ ID NO: 3997 - protein, 21 aa, Artificial Sequence
  Description of Artificial Sequence: Synthetic peptide
  MOD_RES (4)..(4): phosphoserine
DIASLVGHEFFFRKNLLRLTG

SEQ ID NO: 3998 - protein, 20 aa, Artificial Sequence
  Description of Artificial Sequence: Synthetic peptide
  MOD_RES (4)..(4): phosphoserine
DIVSEYTHYFFRKNLLRLTG

SEQ ID NO: 3999 - protein, 22 aa, Artificial Sequence
  Description of Artificial Sequence: Synthetic peptide
  MOD_RES (9)..(9): phosphoserine
DSADLPPPSALFFRKNLLRLTG

SEQ ID NO: 4000 - protein, 26 aa, Artificial Sequence
  Description of Artificial Sequence: Synthetic peptide
  MOD_RES (5)..(5): phosphoserine
DVIDSQELSKVSREFFFRKNLLRLTG

SEQ ID NO: 4001 - protein, 21 aa, Artificial Sequence
  Description of Artificial Sequence: Synthetic peptide
  MOD_RES (6)..(6): phosphoserine
ETRSPSPISIFFRKNLLRLTG

SEQ ID NO: 4002 - protein, 20 aa, Artificial Sequence
  Description of Artificial Sequence: Synthetic peptide
  MOD_RES (3)..(3): oxidized methionine
  MOD_RES (8)..(8): phosphoserine
FKMIRSQSLFFRKNLLRLTG

SEQ ID NO: 4003 - protein, 20 aa, Artificial Sequence
  Description of Artificial Sequence: Synthetic peptide
  MOD_RES (4)..(4): phosphoserine
GAVSPGALRFFRKNLLRLTG

SEQ ID NO: 4004 - protein, 21 aa, Artificial Sequence
  Description of Artificial Sequence: Synthetic peptide
  MOD_RES (4)..(4): phosphoserine
GLPSPRGPGLFFRKNLLRLTG

SEQ ID NO: 4005 - protein, 21 aa, Artificial Sequence
  Description of Artificial Sequence: Synthetic peptide
  MOD_RES (5)..(5): phosphoserine
GRILSGVVTKFFRKNLLRLTG

SEQ ID NO: 4006 - protein, 25 aa, Artificial Sequence
  Description of Artificial Sequence: Synthetic peptide
  MOD_RES (8)..(8): phosphoserine
GRMIRAESGPDLRYFFRKNLLRLTG

SEQ ID NO: 4007 - protein, 25 aa, Artificial Sequence
  Description of Artificial Sequence: Synthetic peptide
  MOD_RES (3)..(3): oxidized methionine
  MOD_RES (8)..(8): phosphoserine
GRMIRAESGPDLRYFFRKNLLRLTG

SEQ ID NO: 4008 - protein, 20 aa, Artificial Sequence
  Description of Artificial Sequence: Synthetic peptide
  MOD_RES (5)..(5): phosphothreonine
HPDGTPPKLFFRKNLLRLTG

SEQ ID NO: 4009 - protein, 20 aa, Artificial Sequence
  Description of Artificial Sequence: Synthetic peptide
  MOD_RES (8)..(8): phosphoserine
HPHLRKVSVFFRKNLLRLTG

SEQ ID NO: 4010 - protein, 22 aa, Artificial Sequence
  Description of Artificial Sequence: Synthetic peptide
  MOD_RES (7)..(7): phosphoserine
HRRIDISPSTLFFRKNLLRLTG

SEQ ID NO: 4011 - protein, 20 aa, Artificial Sequence
  Description of Artificial Sequence: Synthetic peptide
  MOD_RES (3)..(3): phosphoserine
KASSLISLLFFRKNLLRLTG

SEQ ID NO: 4012 - protein, 20 aa, Artificial Sequence
  Description of Artificial Sequence: Synthetic peptide
  MOD_RES (4)..(4): phosphoserine
KASSLISLLFFRKNLLRLTG

SEQ ID NO: 4013 - protein, 22 aa, Artificial Sequence
  Description of Artificial Sequence: Synthetic peptide
  MOD_RES (4)..(4): phosphoserine
KIPSAVSTVSMFFRKNLLRLTG

SEQ ID NO: 4014 - protein, 24 aa, Artificial Sequence
  Description of Artificial Sequence: Synthetic peptide
  MOD_RES (4)..(4): phosphoserine
KRFSMVVQDGIVKFFRKNLLRLTG

SEQ ID NO: 4015 - protein, 24 aa, Artificial Sequence
  Description of Artificial Sequence: Synthetic peptide
  MOD_RES (4)..(4): phosphoserine
  MOD_RES (5)..(5): oxidized methionine
KRFSMVVQDGIVKFFRKNLLRLTG

SEQ ID NO: 4016 - protein, 22 aa, Artificial Sequence
  Description of Artificial Sequence: Synthetic peptide
  MOD_RES (5)..(5): phosphothreonine
KRFSTEEFVLLFFRKNLLRLTG

SEQ ID NO: 4017 - protein, 19 aa, Artificial Sequence
  Description of Artificial Sequence: Synthetic peptide
  MOD_RES (4)..(4): phosphoserine
KRISISTSFFRKNLLRLTG

SEQ ID NO: 4018 - protein, 20 aa, Artificial Sequence
  Description of Artificial Sequence: Synthetic peptide
  MOD_RES (4)..(4): phosphoserine
KRISISTSGFFRKNLLRLTG

SEQ ID NO: 4019 - protein, 21 aa, Artificial Sequence
  Description of Artificial Sequence: Synthetic peptide
  MOD_RES (4)..(4): phosphoserine
KRISISTSGGFFRKNLLRLTG

SEQ ID NO: 4020 - protein, 23 aa, Artificial Sequence
  Description of Artificial Sequence: Synthetic peptide
  MOD_RES (4)..(4): phosphoserine
KRLSLDSSLVEYFFRKNLLRLTG

SEQ ID NO: 4021 - protein, 22 aa, Artificial Sequence
  Description of Artificial Sequence: Synthetic peptide
  MOD_RES (4)..(4): phosphoserine
KRLSLPADIRLFFRKNLLRLTG

SEQ ID NO: 4022 - protein, 20 aa, Artificial Sequence
  Description of Artificial Sequence: Synthetic peptide
  MOD_RES (4)..(4): phosphoserine
KRTSKYFSLFFRKNLLRLTG

SEQ ID NO: 4023 - protein, 22 aa, Artificial Sequence
  Description of Artificial Sequence: Synthetic peptide
  MOD_RES (4)..(4): phosphoserine
LPRSSSMAAGLFFRKNLLRLTG

SEQ ID NO: 4024 - protein, 22 aa, Artificial Sequence
  Description of Artificial Sequence: Synthetic peptide
  MOD_RES (5)..(5): phosphoserine
LPRSSSMAAGLFFRKNLLRLTG

SEQ ID NO: 4025 - protein, 21 aa, Artificial Sequence
  Description of Artificial Sequence: Synthetic peptide
  MOD_RES (4)..(4): phosphoserine
LQHSFSFAGFFFRKNLLRLTG

SEQ ID NO: 4026 - protein, 20 aa, Artificial Sequence
  Description of Artificial Sequence: Synthetic peptide
  MOD_RES (2)..(2): phosphothreonine
LTSKLSTKDFFRKNLLRLTG

SEQ ID NO: 4027 - protein, 21 aa, Artificial Sequence
  Description of Artificial Sequence: Synthetic peptide
  MOD_RES (9)..(9): phosphoserine
NPTMLRTHSLFFRKNLLRLTG

SEQ ID NO: 4028 - protein, 20 aa, Artificial Sequence
  Description of Artificial Sequence: Synthetic peptide
  MOD_RES (3)..(3): phosphoserine
NRSSPVHIIFFRKNLLRLTG

SEQ ID NO: 4029 - protein, 21 aa, Artificial Sequence
  Description of Artificial Sequence: Synthetic peptide
  MOD_RES (6)..(6): phosphothreonine
QVLPKTVKLFFFRKNLLRLTG

SEQ ID NO: 4030 - protein, 23 aa, Artificial Sequence
  Description of Artificial Sequence: Synthetic peptide
  MOD_RES (6)..(6): phosphothreonine
RLPSPTSPFSSLFFRKNLLRLTG

SEQ ID NO: 4031 - protein, 21 aa, Artificial Sequence
  Description of Artificial Sequence: Synthetic peptide
  MOD_RES (7)..(7): phosphoserine
RPKLHHSLSFFFRKNLLRLTG

SEQ ID NO: 4032 - protein, 20 aa, Artificial Sequence
  Description of Artificial Sequence: Synthetic peptide
  MOD_RES (4)..(4): phosphoserine
RPRSDSLILFFRKNLLRLTG

SEQ ID NO: 4033 - protein, 21 aa, Artificial Sequence
  Description of Artificial Sequence: Synthetic peptide
  MOD_RES (4)..(4): phosphoserine
  MOD_RES (5)..(5): oxidized tryptophan
RQPSWDPSPVFFRKNLLRLTG

SEQ ID NO: 4034 - protein, 21 aa, Artificial Sequence
  Description of Artificial Sequence: Synthetic peptide
  MOD_RES (4)..(4): phosphoserine
RRASAPLPGLFFRKNLLRLTG

SEQ ID NO: 4035 - protein, 20 aa, Artificial Sequence
  Description of Artificial Sequence: Synthetic peptide
  MOD_RES (6)..(6): phosphoserine
RRASLSEIGFFRKNLLRLTG

SEQ ID NO: 4036 - protein, 20 aa, Artificial Sequence
  Description of Artificial Sequence: Synthetic peptide
  MOD_RES (4)..(4): phosphoserine
RRASLSEIGFFRKNLLRLTG

SEQ ID NO: 4037 - protein, 21 aa, Artificial Sequence
  Description of Artificial Sequence: Synthetic peptide
  MOD_RES (4)..(4): phosphoserine
RRFSADEQFFFFRKNLLRLTG

SEQ ID NO: 4038 - protein, 21 aa, Artificial Sequence
  Description of Artificial Sequence: Synthetic peptide
  MOD_RES (4)..(4): phosphoserine
RRFSFSANFYFFRKNLLRLTG

SEQ ID NO: 4039 - protein, 21 aa, Artificial Sequence
  Description of Artificial Sequence: Synthetic peptide
  MOD_RES (4)..(4): phosphoserine
RRFSPPSSSLFFRKNLLRLTG

SEQ ID NO: 4040 - protein, 19 aa, Artificial Sequence
  Description of Artificial Sequence: Synthetic peptide
  MOD_RES (6)..(6): phosphoserine
RRIDISPSFFRKNLLRLTG

SEQ ID NO: 4041 - protein, 21 aa, Artificial Sequence
  Description of Artificial Sequence: Synthetic peptide
  MOD_RES (4)..(4): phosphoserine
  MOD_RES (9)..(9): cysteinylated cysteine
RRISIVENCFFFRKNLLRLTG

SEQ ID NO: 4042 - protein, 22 aa, Artificial Sequence
  Description of Artificial Sequence: Synthetic peptide
  MOD_RES (7)..(7): phosphoserine
RRLPIFSRLSIFFRKNLLRLTG

SEQ ID NO: 4043 - protein, 21 aa, Artificial Sequence
  Description of Artificial Sequence: Synthetic peptide
  MOD_RES (4)..(4): phosphoserine
RRLSAIFLRLFFRKNLLRLTG

SEQ ID NO: 4044 - protein, 21 aa, Artificial Sequence
  Description of Artificial Sequence: Synthetic peptide
  MOD_RES (4)..(4): phosphoserine
RRLSFLVSYIFFRKNLLRLTG

SEQ ID NO: 4045 - protein, 21 aa, Artificial Sequence
  Description of Artificial Sequence: Synthetic peptide
  MOD_RES (4)..(4): phosphoserine
RRLSFTLERLFFRKNLLRLTG

SEQ ID NO: 4046 - protein, 22 aa, Artificial Sequence
  Description of Artificial Sequence: Synthetic peptide
  MOD_RES (4)..(4): phosphoserine
RRLSIEGNIAVFFRKNLLRLTG

SEQ ID NO: 4047 - protein, 20 aa, Artificial Sequence
  Description of Artificial Sequence: Synthetic peptide
  MOD_RES (4)..(4): phosphoserine
RRLSPPTLLFFRKNLLRLTG

SEQ ID NO: 4048 - protein, 20 aa, Artificial Sequence
  Description of Artificial Sequence: Synthetic peptide
  MOD_RES (6)..(6): phosphothreonine
  MOD_RES (7)..(7): oxidized methionine
RSFSPTMKVFFRKNLLRLTG

SEQ ID NO: 4049 - protein, 20 aa, Artificial Sequence
  Description of Artificial Sequence: Synthetic peptide
  MOD_RES (3)..(3): phosphoserine
RSSSFTFHIFFRKNLLRLTG

SEQ ID NO: 4050 - protein, 20 aa, Artificial Sequence
  Description of Artificial Sequence: Synthetic peptide
  MOD_RES (4)..(4): phosphoserine
RSSSFTFHIFFRKNLLRLTG

SEQ ID NO: 4051 - protein, 20 aa, Artificial Sequence
  Description of Artificial Sequence: Synthetic peptide
  MOD_RES (2)..(2): phosphothreonine
RTAATEVSLFFRKNLLRLTG

SEQ ID NO: 4052 - protein, 20 aa, Artificial Sequence
  Description of Artificial Sequence: Synthetic peptide
  MOD_RES (4)..(4): phosphoserine
RVDSTTCLFFFRKNLLRLTG

SEQ ID NO: 4053 - protein, 21 aa, Artificial Sequence
  Description of Artificial Sequence: Synthetic peptide
  MOD_RES (4)..(4): phosphoserine
  MOD_RES (7)..(7): cysteinylated cysteine
RVDSTTCLFPFFRKNLLRLTG

SEQ ID NO: 4054 - protein, 20 aa, Artificial Sequence
  Description of Artificial Sequence: Synthetic peptide
  MOD_RES (4)..(4): phosphoserine
RVPSEHPYLFFRKNLLRLTG

SEQ ID NO: 4055 - protein, 23 aa, Artificial Sequence
  Description of Artificial Sequence: Synthetic peptide
  MOD_RES (11)..(11): phosphoserine
SAITPSVSRTSFFFRKNLLRLTG

SEQ ID NO: 4056 - protein, 21 aa, Artificial Sequence
  Description of Artificial Sequence: Synthetic peptide
  MOD_RES (4)..(4): phosphoserine
SEGSEPALLHFFRKNLLRLTG

SEQ ID NO: 4057 - protein, 22 aa, Artificial Sequence
  Description of Artificial Sequence: Synthetic peptide
  MOD_RES (4)..(4): phosphoserine
SIASPDVKLNLFFRKNLLRLTG

SEQ ID NO: 4058 - protein, 20 aa, Artificial Sequence
  Description of Artificial Sequence: Synthetic peptide
  MOD_RES (4)..(4): phosphoserine
SIKSDVPVYFFRKNLLRLTG

SEQ ID NO: 4059 - protein, 20 aa, Artificial Sequence
  Description of Artificial Sequence: Synthetic peptide
  MOD_RES (5)..(5): phosphothreonine
SLALTPPQAFFRKNLLRLTG

SEQ ID NO: 4060 - protein, 18 aa, Artificial Sequence
  Description of Artificial Sequence: Synthetic peptide
  MOD_RES (4)..(4): phosphoserine
SLKSRLRFFRKNLLRLTG

SEQ ID NO: 4061 - protein, 21 aa, Artificial Sequence
  Description of Artificial Sequence: Synthetic peptide
  MOD_RES (4)..(4): phosphoserine
SLPSPHPVRYFFRKNLLRLTG

SEQ ID NO: 4062 - protein, 25 aa, Artificial Sequence
  Description of Artificial Sequence: Synthetic peptide
  MOD_RES (11)..(11): phosphoserine
SPRPSPVPKPSPPLFFRKNLLRLTG

SEQ ID NO: 4063 - protein, 19 aa, Artificial Sequence
  Description of Artificial Sequence: Synthetic peptide
  MOD_RES (4)..(4): phosphoserine
SRFSSGGAFFRKNLLRLTG

SEQ ID NO: 4064 - protein, 20 aa, Artificial Sequence
  Description of Artificial Sequence: Synthetic peptide
  MOD_RES (8)..(8): phosphoserine
SRIVRTPSLFFRKNLLRLTG

SEQ ID NO: 4065 - protein, 21 aa, Artificial Sequence
  Description of Artificial Sequence: Synthetic peptide
  MOD_RES (9)..(9): phosphoserine
SRTSFTSVSRFFRKNLLRLTG

SEQ ID NO: 4066 - protein, 20 aa, Artificial Sequence
  Description of Artificial Sequence: Synthetic peptide
  MOD_RES (5)..(5): phosphoserine
TMPTSLPNLFFRKNLLRLTG

SEQ ID NO: 4067 - protein, 23 aa, Artificial Sequence
  Description of Artificial Sequence: Synthetic peptide
  MOD_RES (4)..(4): phosphoserine
TRLSPIAPAPGFFFRKNLLRLTG

SEQ ID NO: 4068 - protein, 21 aa, Artificial Sequence
  Description of Artificial Sequence: Synthetic peptide
  MOD_RES (4)..(4): phosphoserine
  MOD_RES (8)..(8): oxidized methionine
TSNSQKYMSFFFRKNLLRLTG

SEQ ID NO: 4069 - protein, 20 aa, Artificial Sequence
  Description of Artificial Sequence: Synthetic peptide
  MOD_RES (8)..(8): phosphoserine
TSTSRYLSLFFRKNLLRLTG

SEQ ID NO: 4070 - protein, 21 aa, Artificial Sequence
  Description of Artificial Sequence: Synthetic peptide
  MOD_RES (4)..(4): phosphoserine
VKTSGSSDRLFFRKNLLRLTG

SEQ ID NO: 4071 - protein, 20 aa, Artificial Sequence
  Description of Artificial Sequence: Synthetic peptide
  MOD_RES (4)..(4): phosphoserine
NIKSPALAFFFRKNLLRLTG

SEQ ID NO: 4072 - protein, 21 aa, Artificial Sequence
  Description of Artificial Sequence: Synthetic peptide
  MOD_RES (2)..(2): phosphoserine
LSPRAVSTTFFFRKNLLRLTG

SEQ ID NO: 4073 - protein, 21 aa, Artificial Sequence
  Description of Artificial Sequence: Synthetic peptide
  MOD_RES (4)..(4): phosphoserine
DIASLVGHEFFFRKNWLRLTW

SEQ ID NO: 4074 - protein, 20 aa, Artificial Sequence
  Description of Artificial Sequence: Synthetic peptide
  MOD_RES (4)..(4): phosphoserine
DIVSEYTHYFFRKNWLRLTW

SEQ ID NO: 4075 - protein, 22 aa, Artificial Sequence
  Description of Artificial Sequence: Synthetic peptide
  MOD_RES (9)..(9): phosphoserine
DSADLPPPSALFFRKNWLRLTW

SEQ ID NO: 4076 - protein, 26 aa, Artificial Sequence
  Description of Artificial Sequence: Synthetic peptide
  MOD_RES (5)..(5): phosphoserine
DVIDSQELSKVSREFFFRKNWLRLTW

SEQ ID NO: 4077 - protein, 21 aa, Artificial Sequence
  Description of Artificial Sequence: Synthetic peptide
  MOD_RES (6)..(6): phosphoserine
ETRSPSPISIFFRKNWLRLTW

SEQ ID NO: 4078 - protein, 20 aa, Artificial Sequence
  Description of Artificial Sequence: Synthetic peptide
  MOD_RES (3)..(3): oxidized methionine
  MOD_RES (8)..(8): phosphoserine
FKMIRSQSLFFRKNWLRLTW

SEQ ID NO: 4079 - protein, 20 aa, Artificial Sequence
  Description of Artificial Sequence: Synthetic peptide
  MOD_RES (4)..(4): phosphoserine
GAVSPGALRFFRKNWLRLTW

SEQ ID NO: 4080 - protein, 21 aa, Artificial Sequence
  Description of Artificial Sequence: Synthetic peptide
  MOD_RES (4)..(4): phosphoserine
GLPSPRGPGLFFRKNWLRLTW

SEQ ID NO: 4081 - protein, 21 aa, Artificial Sequence
  Description of Artificial Sequence: Synthetic peptide
  MOD_RES (5)..(5): phosphoserine
GRILSGVVTKFFRKNWLRLTW

SEQ ID NO: 4082 - protein, 25 aa, Artificial Sequence
  Description of Artificial Sequence: Synthetic peptide
  MOD_RES (8)..(8): phosphoserine
GRMIRAESGPDLRYFFRKNWLRLTW

SEQ ID NO: 4083 - protein, 25 aa, Artificial Sequence
  Description of Artificial Sequence: Synthetic peptide
  MOD_RES (3)..(3): oxidized methionine
  MOD_RES (8)..(8): phosphoserine
GRMIRAESGPDLRYFFRKNWLRLTW

SEQ ID NO: 4084 - protein, 20 aa, Artificial Sequence
  Description of Artificial Sequence: Synthetic peptide
  MOD_RES (5)..(5): phosphothreonine
HPDGTPPKLFFRKNWLRLTW

SEQ ID NO: 4085 - protein, 20 aa, Artificial Sequence
  Description of Artificial Sequence: Synthetic peptide
  MOD_RES (8)..(8): phosphoserine
HPHLRKVSVFFRKNWLRLTW

SEQ ID NO: 4086 - protein, 22 aa, Artificial Sequence
  Description of Artificial Sequence: Synthetic peptide
  MOD_RES (7)..(7): phosphoserine
HRRIDISPSTLFFRKNWLRLTW

SEQ ID NO: 4087 - protein, 20 aa, Artificial Sequence
  Description of Artificial Sequence: Synthetic peptide
  MOD_RES (3)..(3): phosphoserine
KASSLISLLFFRKNWLRLTW

SEQ ID NO: 4088 - protein, 20 aa, Artificial Sequence
  Description of Artificial Sequence: Synthetic peptide
  MOD_RES (4)..(4): phosphoserine
KASSLISLLFFRKNWLRLTW

SEQ ID NO: 4089 - protein, 22 aa, Artificial Sequence
  Description of Artificial Sequence: Synthetic peptide
  MOD_RES (4)..(4): phosphoserine
KIPSAVSTVSMFFRKNWLRLTW

SEQ ID NO: 4090 - protein, 24 aa, Artificial Sequence
  Description of Artificial Sequence: Synthetic peptide
  MOD_RES (4)..(4): phosphoserine
KRFSMVVQDGIVKFFRKNWLRLTW

SEQ ID NO: 4091 - protein, 24 aa, Artificial Sequence
  Description of Artificial Sequence: Synthetic peptide
  MOD_RES (4)..(4): phosphoserine
  MOD_RES (5)..(5): oxidized methionine
KRFSMVVQDGIVKFFRKNWLRLTW

SEQ ID NO: 4092 - protein, 22 aa, Artificial Sequence
  Description of Artificial Sequence: Synthetic peptide
  MOD_RES (5)..(5): phosphothreonine
KRFSTEEFVLLFFRKNWLRLTW

SEQ ID NO: 4093 - protein, 19 aa, Artificial Sequence
  Description of Artificial Sequence: Synthetic peptide
  MOD_RES (4)..(4): phosphoserine
KRISISTSFFRKNWLRLTW

SEQ ID NO: 4094 - protein, 20 aa, Artificial Sequence
  Description of Artificial Sequence: Synthetic peptide
  MOD_RES (4)..(4): phosphoserine
KRISISTSGFFRKNWLRLTW

SEQ ID NO: 4095 - protein, 21 aa, Artificial Sequence
  Description of Artificial Sequence: Synthetic peptide
  MOD_RES (4)..(4): phosphoserine
KRISISTSGGFFRKNWLRLTW

SEQ ID NO: 4096 - protein, 23 aa, Artificial Sequence
  Description of Artificial Sequence: Synthetic peptide
  MOD_RES (4)..(4): phosphoserine
KRLSLDSSLVEYFFRKNWLRLTW

SEQ ID NO: 4097 - protein, 22 aa, Artificial Sequence
  Description of Artificial Sequence: Synthetic peptide
  MOD_RES (4)..(4): phosphoserine
KRLSLPADIRLFFRKNWLRLTW

SEQ ID NO: 4098 - protein, 20 aa, Artificial Sequence
  Description of Artificial Sequence: Synthetic peptide
  MOD_RES (4)..(4): phosphoserine
KRTSKYFSLFFRKNWLRLTW

SEQ ID NO: 4099 - protein, 22 aa, Artificial Sequence
  Description of Artificial Sequence: Synthetic peptide
  MOD_RES (4)..(4): phosphoserine
LPRSSSMAAGLFFRKNWLRLTW

SEQ ID NO: 4100 - protein, 22 aa, Artificial Sequence
  Description of Artificial Sequence: Synthetic peptide
  MOD_RES (5)..(5): phosphoserine
LPRSSSMAAGLFFRKNWLRLTW

SEQ ID NO: 4101 - protein, 21 aa, Artificial Sequence
  Description of Artificial Sequence: Synthetic peptide
  MOD_RES (4)..(4): phosphoserine
LQHSFSFAGFFFRKNWLRLTW

SEQ ID NO: 4102 - protein, 20 aa, Artificial Sequence
  Description of Artificial Sequence: Synthetic peptide
  MOD_RES (2)..(2): phosphothreonine
LTSKLSTKDFFRKNWLRLTW

SEQ ID NO: 4103 - protein, 21 aa, Artificial Sequence
  Description of Artificial Sequence: Synthetic peptide
  MOD_RES (9)..(9): phosphoserine
NPTMLRTHSLFFRKNWLRLTW

SEQ ID NO: 4104 - protein, 20 aa, Artificial Sequence
  Description of Artificial Sequence: Synthetic peptide
  MOD_RES (3)..(3): phosphoserine
NRSSPVHIIFFRKNWLRLTW

SEQ ID NO: 4105 - protein, 21 aa, Artificial Sequence
  Description of Artificial Sequence: Synthetic peptide
  MOD_RES (6)..(6): phosphothreonine
QVLPKTVKLFFFRKNWLRLTW

SEQ ID NO: 4106 - protein, 23 aa, Artificial Sequence
  Description of Artificial Sequence: Synthetic peptide
  MOD_RES (6)..(6): phosphothreonine
RLPSPTSPFSSLFFRKNWLRLTW

SEQ ID NO: 4107 - protein, 21 aa, Artificial Sequence
  Description of Artificial Sequence: Synthetic peptide
  MOD_RES (7)..(7): phosphoserine
RPKLHHSLSFFFRKNWLRLTW

SEQ ID NO: 4108 - protein, 20 aa, Artificial Sequence
  Description of Artificial Sequence: Synthetic peptide
  MOD_RES (4)..(4): phosphoserine
RPRSDSLILFFRKNWLRLTW

SEQ ID NO: 4109 - protein, 21 aa, Artificial Sequence
  Description of Artificial Sequence: Synthetic peptide
  MOD_RES (4)..(4): phosphoserine
  MOD_RES (5)..(5): oxidized tryptophan
RQPSWDPSPVFFRKNWLRLTW

SEQ ID NO: 4110 - protein, 21 aa, Artificial Sequence
  Description of Artificial Sequence: Synthetic peptide
  MOD_RES (4)..(4): phosphoserine
RRASAPLPGLFFRKNWLRLTW

SEQ ID NO: 4111 - protein, 20 aa, Artificial Sequence
  Description of Artificial Sequence: Synthetic peptide
  MOD_RES (6)..(6): phosphoserine
RRASLSEIGFFRKNWLRLTW

SEQ ID NO: 4112 - protein, 20 aa, Artificial Sequence
  Description of Artificial Sequence: Synthetic peptide
  MOD_RES (4)..(4): phosphoserine
RRASLSEIGFFRKNWLRLTW

SEQ ID NO: 4113 - protein, 21 aa, Artificial Sequence
  Description of Artificial Sequence: Synthetic peptide
  MOD_RES (4)..(4): phosphoserine
RRFSADEQFFFFRKNWLRLTW

SEQ ID NO: 4114 - protein, 21 aa, Artificial Sequence
  Description of Artificial Sequence: Synthetic peptide
  MOD_RES (4)..(4): phosphoserine
RRFSFSANFYFFRKNWLRLTW

SEQ ID NO: 4115 - protein, 21 aa, Artificial Sequence
  Description of Artificial Sequence: Synthetic peptide
  MOD_RES (4)..(4): phosphoserine
RRFSPPSSSLFFRKNWLRLTW

SEQ ID NO: 4116 - protein, 19 aa, Artificial Sequence
  Description of Artificial Sequence: Synthetic peptide
  MOD_RES (6)..(6): phosphoserine
RRIDISPSFFRKNWLRLTW

SEQ ID NO: 4117 - protein, 21 aa, Artificial Sequence
  Description of Artificial Sequence: Synthetic peptide
  MOD_RES (4)..(4): phosphoserine
  MOD_RES (9)..(9): cysteinylated cysteine
RRISIVENCFFFRKNWLRLTW

SEQ ID NO: 4118 - protein, 22 aa, Artificial Sequence
  Description of Artificial Sequence: Synthetic peptide
  MOD_RES (7)..(7): phosphoserine
RRLPIFSRLSIFFRKNWLRLTW

SEQ ID NO: 4119 - protein, 21 aa, Artificial Sequence
  Description of Artificial Sequence: Synthetic peptide
  MOD_RES (4)..(4): phosphoserine
RRLSAIFLRLFFRKNWLRLTW

SEQ ID NO: 4120 - protein, 21 aa, Artificial Sequence
  Description of Artificial Sequence: Synthetic peptide
  MOD_RES (4)..(4): phosphoserine
RRLSFLVSYIFFRKNWLRLTW

SEQ ID NO: 4121 - protein, 21 aa, Artificial Sequence
  Description of Artificial Sequence: Synthetic peptide
  MOD_RES (4)..(4): phosphoserine
RRLSFTLERLFFRKNWLRLTW

SEQ ID NO: 4122 - protein, 22 aa, Artificial Sequence
  Description of Artificial Sequence: Synthetic peptide
  MOD_RES (4)..(4): phosphoserine
RRLSIEGNIAVFFRKNWLRLTW

SEQ ID NO: 4123 - protein, 20 aa, Artificial Sequence
  Description of Artificial Sequence: Synthetic peptide
  MOD_RES (4)..(4): phosphoserine
RRLSPPTLLFFRKNWLRLTW

SEQ ID NO: 4124 - protein, 20 aa, Artificial Sequence
  Description of Artificial Sequence: Synthetic peptide
  MOD_RES (6)..(6): phosphothreonine
  MOD_RES (7)..(7): oxidized methionine
RSFSPTMKVFFRKNWLRLTW

SEQ ID NO: 4125 - protein, 20 aa, Artificial Sequence
  Description of Artificial Sequence: Synthetic peptide
  MOD_RES (3)..(3): phosphoserine
RSSSFTFHIFFRKNWLRLTW

SEQ ID NO: 4126 - protein, 20 aa, Artificial Sequence
  Description of Artificial Sequence: Synthetic peptide
  MOD_RES (4)..(4): phosphoserine
RSSSFTFHIFFRKNWLRLTW

SEQ ID NO: 4127 - protein, 20 aa, Artificial Sequence
  Description of Artificial Sequence: Synthetic peptide
  MOD_RES (2)..(2): phosphothreonine
RTAATEVSLFFRKNWLRLTW

SEQ ID NO: 4128 - protein, 20 aa, Artificial Sequence
  Description of Artificial Sequence: Synthetic peptide
  MOD_RES (4)..(4): phosphoserine
RVDSTTCLFFFRKNWLRLTW

SEQ ID NO: 4129 - protein, 21 aa, Artificial Sequence
  Description of Artificial Sequence: Synthetic peptide
  MOD_RES (4)..(4): phosphoserine
  MOD_RES (7)..(7): cysteinylated cysteine
RVDSTTCLFPFFRKNWLRLTW

SEQ ID NO: 4130 - protein, 20 aa, Artificial Sequence
  Description of Artificial Sequence: Synthetic peptide
  MOD_RES (4)..(4): phosphoserine
RVPSEHPYLFFRKNWLRLTW

SEQ ID NO: 4131 - protein, 23 aa, Artificial Sequence
  Description of Artificial Sequence: Synthetic peptide
  MOD_RES (11)..(11): phosphoserine
SAITPSVSRTSFFFRKNWLRLTW

SEQ ID NO: 4132 - protein, 21 aa, Artificial Sequence
  Description of Artificial Sequence: Synthetic peptide
  MOD_RES (4)..(4): phosphoserine
SEGSEPALLHFFRKNWLRLTW

SEQ ID NO: 4133 - protein, 22 aa, Artificial Sequence
  Description of Artificial Sequence: Synthetic peptide
  MOD_RES (4)..(4): phosphoserine
SIASPDVKLNLFFRKNWLRLTW

SEQ ID NO: 4134 - protein, 20 aa, Artificial Sequence
  Description of Artificial Sequence: Synthetic peptide
  MOD_RES (4)..(4): phosphoserine
SIKSDVPVYFFRKNWLRLTW

SEQ ID NO: 4135 - protein, 20 aa, Artificial Sequence
  Description of Artificial Sequence: Synthetic peptide
  MOD_RES (5)..(5): phosphothreonine
SLALTPPQAFFRKNWLRLTW

SEQ ID NO: 4136 - protein, 18 aa, Artificial Sequence
  Description of Artificial Sequence: Synthetic peptide
  MOD_RES (4)..(4): phosphoserine
SLKSRLRFFRKNWLRLTW

SEQ ID NO: 4137 - protein, 21 aa, Artificial Sequence
  Description of Artificial Sequence: Synthetic peptide
  MOD_RES (4)..(4): phosphoserine
SLPSPHPVRYFFRKNWLRLTW

SEQ ID NO: 4138 - protein, 25 aa, Artificial Sequence
  Description of Artificial Sequence: Synthetic peptide
  MOD_RES (11)..(11): phosphoserine
SPRPSPVPKPSPPLFFRKNWLRLTW

SEQ ID NO: 4139 - protein, 19 aa, Artificial Sequence
  Description of Artificial Sequence: Synthetic peptide
  MOD_RES (4)..(4): phosphoserine
SRFSSGGAFFRKNWLRLTW

SEQ ID NO: 4140 - protein, 20 aa, Artificial Sequence
  Description of Artificial Sequence: Synthetic peptide
  MOD_RES (8)..(8): phosphoserine
SRIVRTPSLFFRKNWLRLTW

SEQ ID NO: 4141 - protein, 21 aa, Artificial Sequence
  Description of Artificial Sequence: Synthetic peptide
  MOD_RES (9)..(9): phosphoserine
SRTSFTSVSRFFRKNWLRLTW

SEQ ID NO: 4142 - protein, 20 aa, Artificial Sequence
  Description of Artificial Sequence: Synthetic peptide
  MOD_RES (5)..(5): phosphoserine
TMPTSLPNLFFRKNWLRLTW

SEQ ID NO: 4143 - protein, 23 aa, Artificial Sequence
  Description of Artificial Sequence: Synthetic peptide
  MOD_RES (4)..(4): phosphoserine
TRLSPIAPAPGFFFRKNWLRLTW

SEQ ID NO: 4144 - protein, 21 aa, Artificial Sequence
  Description of Artificial Sequence: Synthetic peptide
  MOD_RES (4)..(4): phosphoserine
  MOD_RES (8)..(8): oxidized methionine
TSNSQKYMSFFFRKNWLRLTW

SEQ ID NO: 4145 - protein, 20 aa, Artificial Sequence
  Description of Artificial Sequence: Synthetic peptide
  MOD_RES (8)..(8): phosphoserine
TSTSRYLSLFFRKNWLRLTW

SEQ ID NO: 4146 - protein, 21 aa, Artificial Sequence
  Description of Artificial Sequence: Synthetic peptide
  MOD_RES (4)..(4): phosphoserine
VKTSGSSDRLFFRKNWLRLTW

SEQ ID NO: 4147 - protein, 19 aa, Artificial Sequence
  Description of Artificial Sequence: Synthetic peptide
  MOD_RES (4)..(4): phosphoserine
NIKSPALAFFRKNWLRLTW

SEQ ID NO: 4148 - protein, 21 aa, Artificial Sequence
  Description of Artificial Sequence: Synthetic peptide
  MOD_RES (2)..(2): phosphoserine
LSPRAVSTTFFFRKNWLRLTW

SEQ ID NO: 4149 - protein, 13 aa, Artificial Sequence
  Description of Artificial Sequence: Synthetic peptide
  MOD_RES (12)..(12): phosphoserine
AHDPSGMFRSQSF

SEQ ID NO: 4150 - protein, 9 aa, Artificial Sequence
  Description of Artificial Sequence: Synthetic peptide
  MOD_RES (4)..(4): phosphoserine
RVASPAYSL

SEQ ID NO: 4151 - protein, 11 aa, Artificial Sequence
  Description of Artificial Sequence: Synthetic peptide
  MOD_RES (4)..(4): phosphothreonine
RRWTLGGMVNR

SEQ ID NO: 4152 - protein, 9 aa, Artificial Sequence
  Description of Artificial Sequence: Synthetic peptide
  MOD_RES (8)..(8): phosphoserine
SIPSTLVSF

SEQ ID NO: 4153 - protein, 10 aa, Artificial Sequence
  Description of Artificial Sequence: Synthetic peptide
  MOD_RES (4)..(4): phosphoserine
RRGSYPFIDF

SEQ ID NO: 4154 - protein, 9 aa, Artificial Sequence
  Description of Artificial Sequence: Synthetic peptide
  MOD_RES (2)..(2): phosphothreonine
LTLDQAYSY

SEQ ID NO: 4155 - protein, 10 aa, Artificial Sequence
  Description of Artificial Sequence: Synthetic peptide
  MOD_RES (4)..(4): phosphoserine
  MOD_RES (10)..(10): oxidized methionine
SPPSPVEREM

SEQ ID NO: 4156 - protein, 10 aa, Artificial Sequence
  Description of Artificial Sequence: Synthetic peptide
  MOD_RES (4)..(4): phosphoserine
SPPSPVEREM

SEQ ID NO: 4157 - protein, 9 aa, Artificial Sequence
  Description of Artificial Sequence: Synthetic peptide
  MOD_RES (5)..(5): phosphoserine
LYVLSALLI

SEQ ID NO: 4158 - protein, 10 aa, Artificial Sequence
  Description of Artificial Sequence: Synthetic peptide
  MOD_RES (4)..(4): phosphoserine
RPRSLSSPTV

SEQ ID NO: 4159 - protein, 9 aa, Artificial Sequence
  Description of Artificial Sequence: Synthetic peptide
  MOD_RES (8)..(8): phosphoserine
LPIFNRISV

SEQ ID NO: 4160 - protein, 11 aa, Artificial Sequence
  Description of Artificial Sequence: Synthetic peptide
  MOD_RES (8)..(8): phosphoserine
  MOD_RES (11)..(11): oxidized methionine
IPRYHSQSPSM

SEQ ID NO: 4161 - protein, 9 aa, Artificial Sequence
  Description of Artificial Sequence: Synthetic peptide
  MOD_RES (8)..(8): phosphoserine
SPLVRRPSL

SEQ ID NO: 4162 - protein, 9 aa, Artificial Sequence
  Description of Artificial Sequence: Synthetic peptide
  MOD_RES (8)..(8): phosphoserine
EAPKVSRSL

SEQ ID NO: 4163 - protein, 10 aa, Artificial Sequence
  Description of Artificial Sequence: Synthetic peptide
  MOD_RES (6)..(6): phosphoserine
SLDSPSYVLY

SEQ ID NO: 4164 - protein, 9 aa, Artificial Sequence
  Description of Artificial Sequence: Synthetic peptide
  MOD_RES (4)..(4): phosphoserine
REYSPPYAP

SEQ ID NO: 4165 - protein, 9 aa, Artificial Sequence
  Description of Artificial Sequence: Synthetic peptide
  MOD_RES (8)..(8): phosphoserine
YGYEGSESI

SEQ ID NO: 4166 - protein, 9 aa, Artificial Sequence
  Description of Artificial Sequence: Synthetic peptide
  MOD_RES (4)..(4): phosphoserine
RPSSLPLDF

SEQ ID NO: 4167 - protein, 9 aa, Artificial Sequence
  Description of Artificial Sequence: Synthetic peptide
  MOD_RES (3)..(3): phosphoserine
RPSSLPLDF

SEQ ID NO: 4168 - protein, 10 aa, Artificial Sequence
  Description of Artificial Sequence: Synthetic peptide
  MOD_RES (4)..(4): phosphothreonine
TPITPLKDGF

SEQ ID NO: 4169 - protein, 11 aa, Artificial Sequence
  Description of Artificial Sequence: Synthetic peptide
  MOD_RES (4)..(4): phosphoserine
KRFSFKKSFKL

SEQ ID NO: 4170 - protein, 10 aa, Artificial Sequence
  Description of Artificial Sequence: Synthetic peptide
  MOD_RES (4)..(4): phosphoserine
KRNSRLGFLY

SEQ ID NO: 4171 - protein, 11 aa, Artificial Sequence
  Description of Artificial Sequence: Synthetic peptide
  MOD_RES (4)..(4): phosphoserine
RRASAILPGVL

SEQ ID NO: 4172 - protein, 24 aa, Artificial Sequence
  Description of Artificial Sequence: Synthetic peptide
  MOD_RES (12)..(12): phosphoserine
AHDPSGMFRSQSFFFRKNLLRLTG

SEQ ID NO: 4173 - protein, 20 aa, Artificial Sequence
  Description of Artificial Sequence: Synthetic peptide
  MOD_RES (4)..(4): phosphoserine
RVASPAYSLFFRKNLLRLTG

SEQ ID NO: 4174 - protein, 22 aa, Artificial Sequence
  Description of Artificial Sequence: Synthetic peptide
  MOD_RES (4)..(4): phosphothreonine
RRWTLGGMVNRFFRKNLLRLTG

SEQ ID NO: 4175 - protein, 20 aa, Artificial Sequence
  Description of Artificial Sequence: Synthetic peptide
  MOD_RES (8)..(8): phosphoserine
SIPSTLVSFFFRKNLLRLTG

SEQ ID NO: 4176 - protein, 21 aa, Artificial Sequence
  Description of Artificial Sequence: Synthetic peptide
  MOD_RES (4)..(4): phosphoserine
RRGSYPFIDFFFRKNLLRLTG

SEQ ID NO: 4177 - protein, 20 aa, Artificial Sequence
  Description of Artificial Sequence: Synthetic peptide
  MOD_RES (2)..(2): phosphothreonine
LTLDQAYSYFFRKNLLRLTG

SEQ ID NO: 4178 - protein, 21 aa, Artificial Sequence
  Description of Artificial Sequence: Synthetic peptide
  MOD_RES (4)..(4): phosphoserine
  MOD_RES (10)..(10): oxidized methionine
SPPSPVEREMFFRKNLLRLTG

SEQ ID NO: 4179 - protein, 21 aa, Artificial Sequence
  Description of Artificial Sequence: Synthetic peptide
  MOD_RES (4)..(4): phosphoserine
SPPSPVEREMFFRKNLLRLTG

SEQ ID NO: 4180 - protein, 20 aa, Artificial Sequence
  Description of Artificial Sequence: Synthetic peptide
  MOD_RES (5)..(5): phosphoserine
LYVLSALLIFFRKNLLRLTG

SEQ ID NO: 4181 - protein, 21 aa, Artificial Sequence
  Description of Artificial Sequence: Synthetic peptide
  MOD_RES (4)..(4): phosphoserine
RPRSLSSPTVFFRKNLLRLTG

SEQ ID NO: 4182 - protein, 20 aa, Artificial Sequence
  Description of Artificial Sequence: Synthetic peptide
  MOD_RES (8)..(8): phosphoserine
LPIFNRISVFFRKNLLRLTG

SEQ ID NO: 4183 - protein, 22 aa, Artificial Sequence
  Description of Artificial Sequence: Synthetic peptide
  MOD_RES (8)..(8): phosphoserine
  MOD_RES (11)..(11): oxidized methionine
IPRYHSQSPSMFFRKNLLRLTG

SEQ ID NO: 4184 - protein, 20 aa, Artificial Sequence
  Description of Artificial Sequence: Synthetic peptide
  MOD_RES (8)..(8): phosphoserine
SPLVRRPSLFFRKNLLRLTG

SEQ ID NO: 4185 - protein, 20 aa, Artificial Sequence
  Description of Artificial Sequence: Synthetic peptide
  MOD_RES (8)..(8): phosphoserine
EAPKVSRSLFFRKNLLRLTG

SEQ ID NO: 4186 - protein, 21 aa, Artificial Sequence
  Description of Artificial Sequence: Synthetic peptide
  MOD_RES (6)..(6): phosphoserine
SLDSPSYVLYFFRKNLLRLTG

SEQ ID NO: 4187 - protein, 20 aa, Artificial Sequence
  Description of Artificial Sequence: Synthetic peptide
  MOD_RES (4)..(4): phosphoserine
REYSPPYAPFFRKNLLRLTG

SEQ ID NO: 4188 - protein, 20 aa, Artificial Sequence
  Description of Artificial Sequence: Synthetic peptide
  MOD_RES (8)..(8): phosphoserine
YGYEGSESIFFRKNLLRLTG

SEQ ID NO: 4189 - protein, 20 aa, Artificial Sequence
  Description of Artificial Sequence: Synthetic peptide
  MOD_RES (4)..(4): phosphoserine
RPSSLPLDFFFRKNLLRLTG

SEQ ID NO: 4190 - protein, 20 aa, Artificial Sequence
  Description of Artificial Sequence: Synthetic peptide
  MOD_RES (3)..(3): phosphoserine
RPSSLPLDFFFRKNLLRLTG

SEQ ID NO: 4191 - protein, 21 aa, Artificial Sequence
  Description of Artificial Sequence: Synthetic peptide
  MOD_RES (4)..(4): phosphothreonine
TPITPLKDGFFFRKNLLRLTG

SEQ ID NO: 4192 - protein, 22 aa, Artificial Sequence
  Description of Artificial Sequence: Synthetic peptide
  MOD_RES (4)..(4): phosphoserine
KRFSFKKSFKLFFRKNLLRLTG

SEQ ID NO: 4193 - protein, 21 aa, Artificial Sequence
  Description of Artificial Sequence: Synthetic peptide
  MOD_RES (4)..(4): phosphoserine
KRNSRLGFLYFFRKNLLRLTG

SEQ ID NO: 4194 - protein, 22 aa, Artificial Sequence
  Description of Artificial Sequence: Synthetic peptide
  MOD_RES (4)..(4): phosphoserine
RRASAILPGVLFFRKNLLRLTG

SEQ ID NO: 4195 - protein, 24 aa, Artificial Sequence
  Description of Artificial Sequence: Synthetic peptide
  MOD_RES (12)..(12): phosphoserine
AHDPSGMFRSQSFFFRKNWLRLTW

SEQ ID NO: 4196 - protein, 20 aa, Artificial Sequence
  Description of Artificial Sequence: Synthetic peptide
  MOD_RES (4)..(4): phosphoserine
RVASPAYSLFFRKNWLRLTW

SEQ ID NO: 4197 - protein, 22 aa, Artificial Sequence
  Description of Artificial Sequence: Synthetic peptide
  MOD_RES (4)..(4): phosphothreonine
RRWTLGGMVNRFFRKNWLRLTW

SEQ ID NO: 4198 - protein, 20 aa, Artificial Sequence
  Description of Artificial Sequence: Synthetic peptide
  MOD_RES (8)..(8): phosphoserine
SIPSTLVSFFFRKNWLRLTW

SEQ ID NO: 4199 - protein, 21 aa, Artificial Sequence
  Description of Artificial Sequence: Synthetic peptide
  MOD_RES (4)..(4): phosphoserine
RRGSYPFIDFFFRKNWLRLTW

SEQ ID NO: 4200 - protein, 20 aa, Artificial Sequence
  Description of Artificial Sequence: Synthetic peptide
  MOD_RES (2)..(2): phosphothreonine
LTLDQAYSYFFRKNWLRLTW

SEQ ID NO: 4201 - protein, 21 aa, Artificial Sequence
  Description of Artificial Sequence: Synthetic peptide
  MOD_RES (4)..(4): phosphoserine
  MOD_RES (10)..(10): oxidized methionine
SPPSPVEREMFFRKNWLRLTW

SEQ ID NO: 4202 - protein, 21 aa, Artificial Sequence
  Description of Artificial Sequence: Synthetic peptide
  MOD_RES (4)..(4): phosphoserine
SPPSPVEREMFFRKNWLRLTW

SEQ ID NO: 4203 - protein, 20 aa, Artificial Sequence
  Description of Artificial Sequence: Synthetic peptide
  MOD_RES (5)..(5): phosphoserine
LYVLSALLIFFRKNWLRLTW

SEQ ID NO: 4204 - protein, 21 aa, Artificial Sequence
  Description of Artificial Sequence: Synthetic peptide
  MOD_RES (4)..(4): phosphoserine
RPRSLSSPTVFFRKNWLRLTW

SEQ ID NO: 4205 - protein, 20 aa, Artificial Sequence
  Description of Artificial Sequence: Synthetic peptide
  MOD_RES (8)..(8): phosphoserine
LPIFNRISVFFRKNWLRLTW

SEQ ID NO: 4206 - protein, 22 aa, Artificial Sequence
  Description of Artificial Sequence: Synthetic peptide
  MOD_RES (8)..(8): phosphoserine
  MOD_RES (11)..(11): oxidized methionine
IPRYHSQSPSMFFRKNWLRLTW

SEQ ID NO: 4207 - protein, 20 aa, Artificial Sequence
  Description of Artificial Sequence: Synthetic peptide
  MOD_RES (8)..(8): phosphoserine
SPLVRRPSLFFRKNWLRLTW

SEQ ID NO: 4208 - protein, 20 aa, Artificial Sequence
  Description of Artificial Sequence: Synthetic peptide
  MOD_RES (8)..(8): phosphoserine
EAPKVSRSLFFRKNWLRLTW

SEQ ID NO: 4209 - protein, 21 aa, Artificial Sequence
  Description of Artificial Sequence: Synthetic peptide
  MOD_RES (6)..(6): phosphoserine
SLDSPSYVLYFFRKNWLRLTW

SEQ ID NO: 4210 - protein, 20 aa, Artificial Sequence
  Description of Artificial Sequence: Synthetic peptide
  MOD_RES (4)..(4): phosphoserine
REYSPPYAPFFRKNWLRLTW

SEQ ID NO: 4211 - protein, 20 aa, Artificial Sequence
  Description of Artificial Sequence: Synthetic peptide
  MOD_RES (8)..(8): phosphoserine
YGYEGSESIFFRKNWLRLTW

SEQ ID NO: 4212 - protein, 20 aa, Artificial Sequence
  Description of Artificial Sequence: Synthetic peptide
  MOD_RES (4)..(4): phosphoserine
RPSSLPLDFFFRKNWLRLTW

SEQ ID NO: 4213 - protein, 20 aa, Artificial Sequence
  Description of Artificial Sequence: Synthetic peptide
  MOD_RES (3)..(3): phosphoserine
RPSSLPLDFFFRKNWLRLTW

SEQ ID NO: 4214 - protein, 21 aa, Artificial Sequence
  Description of Artificial Sequence: Synthetic peptide
  MOD_RES (4)..(4): phosphothreonine
TPITPLKDGFFFRKNWLRLTW

SEQ ID NO: 4215 - protein, 22 aa, Artificial Sequence
  Description of Artificial Sequence: Synthetic peptide
  MOD_RES (4)..(4): phosphoserine
KRFSFKKSFKLFFRKNWLRLTW

SEQ ID NO: 4216 - protein, 21 aa, Artificial Sequence
  Description of Artificial Sequence: Synthetic peptide
  MOD_RES (4)..(4): phosphoserine
KRNSRLGFLYFFRKNWLRLTW

SEQ ID NO: 4217 - protein, 22 aa, Artificial Sequence
  Description of Artificial Sequence: Synthetic peptide
  MOD_RES (4)..(4): phosphoserine
RRASAILPGVLFFRKNWLRLTW

1. An antigenic polypeptide of 8 to 100 amino acids in length, comprising an MHC-binding peptide comprising an amino acid sequence selected from the group consisting of SEQ ID NOs: 98-1371, 3921-3996, and 4149-4171.

2. The antigenic polypeptide of claim 1, wherein:
the amino acid sequence of the MHC-binding peptide consists of an amino acid sequence selected from the group consisting of SEQ ID NOs: 98-1371, 3921-3996, and 4149-4171; and/or
the amino acid sequence of the antigenic polypeptide consists of an amino acid sequence selected from the group consisting of SEQ ID NOs: 98-1371, 3921-3996, and 4149-4171.

3. (canceled)

4. The antigenic polypeptide of claim 1, further comprising an HSP-binding peptide, optionally wherein:
(i) the HSP-binding peptide comprises the amino acid sequence of X1X2X3X4X5X6X7 (SEQ ID NO: 1), wherein X1 is omitted, N, F, or Q; X2 is W, L, or F; X3 is L or I; X4 is R, L, or K; X5 is L, W, or I; X6 is T, L, F, K, R, or W; and X7 is W, G, K, or F;
(ii) the HSP-binding peptide comprises the amino acid sequence of:
(a) X1LX2LTX3 (SEQ ID NO: 2), wherein X1 is W or F; X2 is R or K; and X3 is W, F, or G;
(b) NX1LX2LTX3 (SEQ ID NO: 3), wherein X1 is W or F; X2 is R or K; and X3 is W, F, or G;
(c) WLX1LTX2 (SEQ ID NO: 4), wherein X1 is R or K; and X2 is W or G;
(d) NWLX1LTX2 (SEQ ID NO: 5), wherein X1 is R or K; and X2 is W or G; or
(e) NWX1X2X3X4X5 (SEQ ID NO: 6), wherein X1 is L or I; X2 is L, R, or K; X3 is L or I; X4 is T, L, F, K, R, or W; and X5 is W or K; and/or
(iii) the HSP-binding peptide comprises:
an amino acid sequence selected from the group consisting of SEQ ID NOs: 7-42, optionally wherein the amino acid sequence of the HSP-binding peptide consists of an amino acid sequence selected from the group consisting of SEQ ID NOs: 7-42;
and optionally
(iv) the amino acid sequence of the antigenic polypeptide comprises an amino acid sequence selected from the group consisting of SEQ ID NOs: 1372-3919, 3997-4148, and 4172-4217; or consists of an amino acid sequence selected from the group consisting of SEQ ID NOs: 1372-3919, 3997-4148, and 4172-4217.

5.-43. (canceled)

44. The antigenic polypeptide of claim 1, wherein:
the MHC-binding peptide is 8 to 50 amino acids in length, optionally 8, 9, 10, 11, 12, 13, 14, 15, 16, 17, 18, 19, 20, 21, 22, 23, 24, 25, 26, 27, 28, 29, 30, 31, 32, 33, 34, 35, 36, 37, 38, 39, 40, 41, 42, 43, 44, 45, 46, 47, 48, 49, or 50 amino acids in length;
the C-terminus of the MHC-binding peptide is linked to the N-terminus of the HSP-binding peptide;
the N-terminus of the MHC-binding peptide is linked to the C-terminus of the HSP-binding peptide;
the HSP-binding peptide is linked to the MHC-binding peptide via a chemical linker; and/or
the HSP-binding peptide is linked to the MHC-binding peptide via a peptide linker, optionally wherein the peptide linker comprises the amino acid sequence of SEQ ID NO: 43, or the peptide linker comprises the amino acid sequence of FR.

45.-50. (canceled)

51. The antigenic polypeptide of claim 44, wherein the N-terminus of the MHC-binding peptide is linked to the C-terminus of:
(a) the amino acid sequence of X1X2X3X4X5X6X7FFRK (SEQ ID NO: 68), wherein X1 is omitted, N, F, or Q; X2 is W, L, or F; X3 is L or I; X4 is R, L, or K; X5 is L, W, or I; X6 is T, L, F, K, R, or W; and X7 is W, G, K, or F;
(b) the amino acid sequence of X1LX2LTX3FFRK (SEQ ID NO: 69), wherein X1 is W or F; X2 is R or K; and X3 is W, F, or G;
(c) the amino acid sequence of NX1LX2LTX3FFRK (SEQ ID NO: 70), wherein X1 is W or F; X2 is R or K; and X3 is W, F, or G;
(d) the amino acid sequence of WLX1LTX2FFRK (SEQ ID NO: 71), wherein X1 is R or K; and X2 is W or G;
(e) the amino acid sequence of NWLX1LTX2FFRK (SEQ ID NO: 72), wherein X1 is R or K; and X2 is W or G;
(f) the amino acid sequence of NWX1X2X3X4X5FFRK (SEQ ID NO: 73), wherein X1 is L or I; X2 is L, R, or K; X3 is L or I; X4 is T, L, F, K, R, or W; and X5 is W or K; or
(g) an amino acid sequence selected from the group consisting of SEQ ID NOs: 74-97.

52.-75. (canceled)

76. The isolated polypeptide of claim 44, wherein:
the C-terminus of the MHC-binding peptide is linked to the N-terminus of:
(a) the amino acid sequence of FFRKX1X2X3X4X5X6X7 (SEQ ID NO: 44), wherein X1 is omitted, N, F, or Q; X2 is W, L, or F; X3 is L or I; X4 is R, L, or K; X5 is L, W, or I; X6 is T, L, F, K, R, or W; and X7 is W, G, K, or F;
(b) the amino acid sequence of FFRKX1LX2LTX3 (SEQ ID NO: 45), wherein X1 is W or F; X2 is R or K; and X3 is W, F, or G;
(c) the amino acid sequence of FFRKNX1LX2LTX3 (SEQ ID NO: 46), wherein X1 is W or F; X2 is R or K; and X3 is W, F, or G;
(d) the amino acid sequence of FFRKWLX1LTX2 (SEQ ID NO: 47), wherein X1 is R or K; and X2 is W or G;
(e) the amino acid sequence of FFRKNWLX1LTX2 (SEQ ID NO: 48), wherein X1 is R or K; and X2 is W or G;
(f) the amino acid sequence of FFRKNWX1X2X3X4X5 (SEQ ID NO: 49), wherein X1 is L or I; X2 is L, R, or K; X3 is L or I; X4 is T, L, F, K, R, or W; and X5 is W or K; or
(g) an amino acid sequence selected from the group consisting of SEQ ID NOs: 50-67.

77.-94. (canceled)

95. The antigenic polypeptide of claim 1, wherein:
a) the amino acid sequence of the antigenic polypeptide comprises an amino acid sequence selected from the group consisting of SEQ ID NOs: 1372-3919, 3997-4148, and 4172-4217;
b) the antigenic polypeptide is 8 to 50 amino acids in length, optionally 8, 9, 10, 11, 12, 13, 14, 15, 16, 17, 18, 19, 20, 21, 22, 23, 24, 25, 26, 27, 28, 29, 30, 31, 32, 33, 34, 35, 36, 37, 38, 39, 40, 41, 42, 43, 44, 45, 46, 47, 48, 49, or 50 amino acids in length; and/or
c) the antigenic polypeptide is chemically synthesized, and/or comprises a phosphopeptide, wherein a phosphorylated amino acid residue of the phosphopeptide is replaced by a non-hydrolyzable mimetic of the phosphorylated amino acid residue.

96.-99. (canceled)

100. A composition comprising at least one of the antigenic polypeptides of claim 1, optionally wherein:
the composition further comprises 2, 3, 4, 5, 6, 7, 8, 9, 10, 11, 12, 13, 14, 15, 16, 17, 18, 19, 20, 21, 22, 23, 24, 25, 26, 27, 28, 29, 30, 31, 32, 33, 34, 35, 36, 37, 38, 39, 40, 41, 42, 43, 44, 45, 46, 47, 48, 49, or 50 different antigenic polypeptides; and/or
an adjuvant, optionally wherein the adjuvant comprises a saponin or an immunostimulatory nucleic acid, optionally QS-21, and/or a TLR agonist, optionally a TLR4 agonist, TLR5 agonist, TLR7 agonist, TLR8 agonist, and/or TLR9 agonist.

101. A composition comprising a complex of the antigenic polypeptide of claim 1, and a purified stress protein, optionally wherein the stress protein is selected from the group consisting of Hsc70, Hsp70, Hsp90, Hsp110, Grp170, Gp96, Calreticulin, and a mutant or fusion protein thereof; optionally wherein the stress protein comprises human Hsc70, optionally wherein the Hsc70 comprises the amino acid sequence of SEQ ID NO: 3920;
the stress protein is a recombinant protein; and/or
each of the different polypeptides comprise the same HSP-binding peptide and a different MHC-binding peptide.

102.-118. (canceled)

119. A method of inducing a cellular immune response to an antigenic polypeptide in a subject, the method comprising administering to the subject an effective amount of the antigenic polypeptide of claim 1.

120. (canceled)

121. A method of treating a disease in a subject, the method comprising administering to the subject an effective amount of the antigenic polypeptide of claim 1.

122.-131. (canceled)

132. A kit comprising a first container containing the polypeptide of claim 1 and a second container containing a purified stress protein capable of binding to the polypeptide.

133-145. (canceled)

146. A method of making a vaccine, the method comprising mixing one or more of the polypeptides of claim 1 with a purified stress protein under suitable conditions such that the purified stress protein binds to at least one of the polypeptides.

147.-153. (canceled)

154. An isolated antibody that: (i) specifically binds to an MHC-binding peptide selected from the group consisting of SEQ ID NOs: 98-1371, 3921-3996, and 4149-4171, optionally wherein the antibody does not specifically bind to an unphosphorylated variant of the MHC-binding peptide; and/or (ii) specifically binds to a complex of an MHC molecule and an MHC-binding peptide selected from the group consisting of SEQ ID NOs: 98-1371, 3921-3996, and 4149-4171, optionally wherein the antibody does not specifically bind to a complex of an MHC molecule and an unphosphorylated variant of the MHC-binding peptide.

155. (canceled)

156. An isolated T cell receptor (TCR) that specifically binds to a complex of an MHC molecule and an MHC-binding peptide selected from the group consisting of SEQ ID NOs: 98-1371, 3921-3996, and 4149-4171, optionally wherein the TCR does not specifically bind to a complex of the MHC molecule and an unphosphorylated variant of the MHC-binding peptide.

157.-158. (canceled)

159. An isolated polynucleotide encoding: (i) a VH and/or VL of an antibody that specifically binds to an MHC-binding peptide selected from the group consisting of SEQ ID NOs: 98-1371, 3921-3996, and 4149-4171; or (ii) a variable region of a TCR that specifically binds to a complex of an MHC molecule and an MHC-binding peptide selected from the group consisting of SEQ ID NOs: 98-1371, 3921-3996, and 4149-4171.

160.-161. (canceled)

162. A vector comprising the polynucleotide of claim 159.

163. (canceled)

164. An engineered cell comprising the polynucleotide of claim 159.

165.-166. (canceled)

167. An engineered cell comprising the antibody of claim 154.

168. An engineered cell comprising the TCR of claim 156.
